(19) United States
(12) Patent Application Publication
(10) Pub. No.: US 2024/0102020 A1
(43) Pub. Date: Mar. 28, 2024

(54) POLYNUCLEOTIDE AGENTS TARGETING PROGRAMMED CELL DEATH 1 LIGAND 1 (PD-L1) AND METHODS OF USE THEREOF

(71) Applicant: Alnylam Pharmaceuticals, Inc., Cambridge, MA (US)

(72) Inventor: Gregory Hinkle, Plymouth, MA (US)

(21) Appl. No.: 18/202,328

(22) Filed: May 26, 2023

Related U.S. Application Data
(63) Continuation of application No. 17/203,986, filed on Mar. 17, 2021, now abandoned.
Application No. 17/203,986 is a continuation of application No. 15/781,747, filed on Jun. 6, 2018, now Pat. No. 10,982,215.
(60) Provisional application No. 62/264,975, filed on Dec. 9, 2015.

(51) Int. Cl. C12N 15/113; A61K 9/00; A61K 9/08; A61K 9/127; A61K 9/51; A61K 31/7088; A61K 31/712; A61K 31/7125; A61K 45/06; A61K 47/02; A61K 47/28; A61K 47/54; G01N 33/569; G01N 33/574

(52) U.S. Cl. CPC C12N 15/1138; A61K 9/0019; A61K 9/08; A61K 9/1271; A61K 9/5123; A61K 31/7088; A61K 31/712; A61K 31/7125; A61K 45/06; A61K 47/02; A61K 47/28; A61K 47/549; G01N 33/56983; G01N 33/574; C12N 2310/11; C12N 2310/315; C12N 2310/321; C12N 2310/322; C12N 2310/3341; C12N 2310/341; C12N 2310/346; C12N 2310/351; C12N 2310/3515; C12N 2320/35

(57) ABSTRACT

The invention relates to polynucleotide agents targeting programmed cell death 1 ligand 1 (PD-L1) gene, and methods of using such polynucleotide agents to inhibit expression of PD-L1 and to treat subjects having a PD-L1-associated disorder.

### RELATED APPLICATIONS

[0001] This application is a continuation of U.S. patent application Ser. No. 17/203,986, filed on Mar. 17, 2021, which is a continuation of U.S. patent application Ser. No. 15/781,747, filed on Jun. 6, 2018, which is a 35 U.S.C. § 371 national stage filing of International Application No. PCT/US2016/065846, filed on Dec. 9, 2016, which in turn claims the benefit of priority to U.S. Provisional Patent Application No. 62/264,975, filed on Dec. 9, 2015. The entire contents of which each of the foregoing applications are hereby incorporated herein by reference.

### SEQUENCE LISTING

[0002] The application contains a Sequence Listing which has been submitted electronically in .XML format and is hereby incorporated by reference in its entirety. Said .XML copy, created on Nov. 24, 2023, is named “121301_04904_SL.xml” and is 4,859,900 bytes in size. The sequence listing contained in this .XML file is part of the specification and is hereby incorporated by reference herein in its entirety.

### BACKGROUND OF THE INVENTION

[0003] Programmed cell death 1 ligand 1 (PD-L1) is a 290 amino acid type I transmembrane protein encoded by the CD274 gene on mouse chromosome 19 and human chromosome 9. PD-L1 expression is involved in evasion of immune responses involved in chronic infection, e.g., chronic viral infection (including, for example, HIV, HBV, HCV and HTLV, among others), chronic bacterial infection (including, for example, Helicobacter pylori, among others), and chronic parasitic infection (including, for example, Schistosoma mansoni). PD-L1 expression has been detected in a number of tissues and cell types including T-cells, B-cells, macrophages, dendritic cells, and nonhematopoietic cells including endothelial cells, hepatocytes, muscle cells, and placenta.

[0004] PD-L1 expression is also involved in suppression of anti-tumor immune activity. Tumors express antigens that can be recognized by host T cells, but immunologic clearance of tumors is rare. Part of this failure is due to immune suppression by the tumor microenvironment. PD-L1 expression on many tumors is a component of this suppressive milieu and acts in concert with other immunosuppressive signals. PD-L1 expression has been shown in situ on a wide variety of solid tumors including breast, lung, colon, ovarian, melanoma, bladder, liver, salivary, stomach, gliomas, thyroid, thymic epithelial, head, and neck (Brown J A et al., 2003. J. Immunol. 170:1257-66; Dong H et al. 2002. Nat. Med. 8:793-800; Hamanishi J, et al. 2007. Proc. Natl. Acad. Sci. USA 104:3360-65; Strome S E et al. 2003. Cancer Res. 63:6501-5; Inman B A et al. 2007. Cancer 109:1499-505; Konishi Jet al. 2004. Clin. Cancer Res. 10:5094-100; Nakanishi J et al. 2007. Cancer Immunol. Immunother. 56:1173-82; Nomi T et al. 2007. Clin. Cancer Res. 13:2151-57; Thompson R H et al. 2004. Proc. Natl. Acad. Sci. USA 101:17174-79; Wu C, Zhu Y, Jiang J, Zhao J, Zhang X G, Xu N. 2006. Acta Histochem. 108:19-24). In addition, the expression of the receptor for PD-L1, Programmed cell death protein 1 (also known as PD-1 and CD279) is upregulated on tumor infiltrating lymphocytes, and this also contributes to tumor immunosuppression (Blank C et al. 2003. J. Immunol. 171:4574-81). Most importantly, studies relating PD-L1 expression on tumors to disease outcome show that PD-L1 expression strongly correlates with unfavorable prognosis in kidney, ovarian, bladder, breast, gastric, and pancreatic cancer (Hamanishi J et al. 2007. Proc. Natl. Acad. Sci. USA 104:3360-65; Inman B A et al. 2007. Cancer 109:1499-505; Konishi J et al. 2004. Clin. Cancer Res. 10:5094-100; Nakanishi J et al. 2007. Cancer Immunol. Immunother. 56:1173-82; Nomi T et al. 2007. Clin. Cancer Res. 13:2151-57; Thompson R H et al. 2004. Proc. Natl. Acad. Sci. USA 101:17174-79; Wu C, Zhu Y, Jiang J, Zhao J, Zhang X G, Xu N. 2006. Acta Histochem. 108:19-24). In addition, these studies suggest that higher levels of PD-L1 expression on tumors may facilitate advancement of tumor stage and invasion into deeper tissue structures.

[0005] The PD-1 pathway can also play a role in hematologic malignancies. PD-L1 is expressed on multiple myeloma cells but not on normal plasma cells (Liu J et al. 2007. Blood 110:296-304). PD-L1 is expressed on some primary T cell lymphomas, particularly anaplastic large cell T lymphomas (Brown J A et al., 2003. J. Immunol. 170:1257-66). PD-1 is highly expressed on the T cells of angioimmunoblastic lymphomas, and PD-L1 is expressed on the associated follicular dendritic cell network (Dorfman D M et al. 2006. Am. J. Surg. Pathol. 30:802-10). In nodular lymphocyte-predominant Hodgkin lymphoma, the T cells associated with lymphocytic or histiocytic (L&H) cells express PD-1. Microarray analysis using a readout of genes induced by PD-1 ligation suggests that tumor-associated T cells are responding to PD-1 signals in situ in Hodgkin lymphoma (Chemnitz J M et al. 2007. Blood 110:3226-33). PD-1 and PD-L1 are expressed on CD4 T cells in HTLV-1-mediated adult T cell leukemia and lymphoma (Shimauchi T et al. 2007. Int. J. Cancer 121: 2585-90). These tumor cells are hyporesponsive to TCR signals.

[0006] Studies in animal models demonstrate that PD-L1 on tumors inhibits T cell activation and lysis of tumor cells and in some cases leads to increased tumor-specific T cell death (Dong H et al. 2002. Nat. Med. 8:793-800; Hirano F et al. 2005. Cancer Res. 65:1089-96). Tumor-associated APCs can also utilize the PD-1:PD-L pathway to control antitumor T cell responses. PD-L1 expression on a population of tumor-associated myeloid DCs is upregulated by tumor environmental factors (Curiel T J et al. 2003. Nat. Med. 9:562-67). Plasmacytoid dendritic cells (DCs) in the tumor-draining lymph node of B16 melanoma express IDO, which strongly activates the suppressive activity of regulatory T cells. The suppressive activity of IDO-treated regulatory T cells required cell contact with MO-expressing DCs (Sharma M D et al. 2007. 1 Clin. Invest. 117:2570-82).

[0007] Accordingly, there is a need in the art for effective treatments for PD-L1-associated diseases, such as an infectious disease, such as a chronic intracellular infectious disease, e.g., a viral disease, e.g., hepatitis infection, or a bacterial infection, e.g., tuberculosis infection;

[0008] and cancer, e.g., a hepatic cancer, e.g., hepatocellular carcinoma.

### SUMMARY OF THE INVENTION

[0009] The present invention provides polynucleotide agents, e.g., antisense polynucleotide agents, and compositions comprising such agents which target nucleic acid molecules encoding programmed cell death 1 ligand 1 (PD-L1) and interfere with the normal function of the targeted nucleic acid. The PD-L1 nucleic acid may be within a cell, e.g., a cell within a subject, such as a human. The present invention also provides methods and combination therapies for treating a subject having a disorder that would benefit from inhibiting or reducing the expression of a PD-L1 mRNA, e.g., a PD-L1-associated disease, such as an infectious disease, such as a chronic, intracellular infectious disease or cancer, e.g, a hepatic cancer, using the polynucleotide agents and compositions of the invention.

[0010] Accordingly, in one aspect, the present invention provides antisense polynucleotide agents for inhibiting expression of a Programmed cell death 1 ligand 1 (PD-L1) gene. The agents include about 4 to about 50 contiguous nucleotides, wherein at least one of the contiguous nucleotides is a modified nucleotide, and wherein the nucleotide sequence of the agent is at least about 80%, about 81%, about 82%, about 83%, about 84%, about 85%, about 86%, about 87%, about 88%, about 89%, about 90%, about 91%, about 92%, about 93%, about 94%, about 95%, about 96%, about 97%, about 98%, about 99%, or about 100% complementary over its entire length to the equivalent region of the nucleotide sequence of any one of SEQ ID NOs:1-5.

[0011] In one embodiment, the equivalent region is one of the target regions of SEQ ID NO:1 provided in Table 3, e.g., residues 10-29; 44-75; 44-141; 78-141; 187-305; 309-349; 351-467; 309-467; 472-503; 505-570; 472-570; 571-590; 505-590; 606-647; 681-755; 769-788; 793-811; 815-834; 859-911; 1000-1019; 1044-1076; 1100-1152; 1177-1196; 1211-1241; 1242-1261; 1211-1261; 1277-1307; 1309-1328; 1277-1328; 1342-1373; 1374-1407; 1418-1450; 1462-1493; 1497-1582; 1650-1713; 1650-1756; 1716-1756; 1781-1879; 1915-1945; 1958-1977; 1990-2009; 2112-2131; 2167-2186; 2211-2230; 2288-2307; 2332-2351; 2364-2383; 2552-2571; 2575-2594; 2552-2594; 2652-2671; 2739-2801; 2826-2878; 2904-2933; 2970-2989; 3013-3032; 3035-3054; 3113-3142; 3158-3199 of SEQ ID NO: 1.

[0012] In another aspect, the present invention provides antisense polynucleotide agents for inhibiting expression of Programmed cell death 1 ligand 1 (PD-L1) gene, wherein the agent comprises at least 8 contiguous nucleotides differing by no more than 3 nucleotides from any one of the nucleotide sequences listed in Table 3.

[0013] In another aspect, the present invention provides antisense polynucleotide agents for inhibiting expression of Programmed cell death 1 ligand 1 (PD-L1) gene, wherein the agent comprises at least 8 contiguous nucleotides differing by no more than 3 nucleotides from any one of the nucleotide sequences listed in Table 3, and wherein the agent is about 8 to about 50 nucleotides in length.

[0014] In certain embodiments, the nucleotide sequence is selected from the group consisting of A-142879, A-143094, A-142866, A-143010, A-143020, A-142949, A-142892, A-142863, A-143019, A-142976, A-142871, A-142991, A-142932, A-142854, A-142861, A-143007, A-142882, A-142933, A-142857, A-142897, A-142889; A-142987, A-142920, A-143022, A-142870, A-142948, A-143027, A-142858, A-142956, A-143034, A-142993, A-142874, A-142953, A-143003, A-142917, A-142864, A-143006, A-142915, A-143016, A-143110, A-142900, A-142872, A-142995, A-143103, A-142954, A-142992, A-142994, A-142982, A-143015, A-143111, A-142944, A-143112, A-143141, A-143004, A-142966, A-142903, A-143104, A-142908, A-142860, A-142902, A-143106, A-142934, A-143021, A-142923, A-142979, A-142918, A-142960, A-142972, A-143113, A-143105, A-142862; A-143031, A-142910, A-142964, A-142975, A-142925, A-142919, A-142873, A-142878, A-143123, A-143068, A-142885, A-143005, A-143017, A-143142, A-142990, A-143085, A-142894, A-143028, A-143009, A-142886, A-143129, A-142969, A-142931, A-142989, A-143065, A-143102, A-143045, A-143117, A-142916, A-142865, A-142955, A-143087, A-142891, A-143011, A-142986, A-143050, A-142883, A-142983, A-143018, A-142970, A-143118, A-142881, A-142890, A-143136, A-142963, A-143140, A-143061, A-142899, A-142927, A-143054, A-142876, A-142905, A-142909, A-142978, A-142896, A-143127, and A-142887.

[0015] In other embodiments, the nucleotide sequence is selected from the group consisting of A-142879, A-143094, A-142866, A-143010, A-143020, A-142949, A-142892, A-142863, A-143019, A-142976, A-142871, A-142991, A-142932, A-142854, A-142861, A-143007, A-142882, A-142933, A-142857, A-142897, A-142889, A-142987, A-142920, A-143022, A-142870, A-142948, A-143027, A-142858, A-142956, A-143034, A-142993, A-142874, A-142953, A-143003, A-142917, A-142864, A-143006, A-142915, A-143016, A-143110, A-142900, A-142872, A-142995, A-143103, A-142954, A-142992, A-142994, A-142982, A-143015, A-143111, A-142944, A-143112, A-143141, A-143004, A-142966, A-142903, A-143104, A-142908, A-142860, A-142902, A-143106, A-142934, A-143021, A-142923, A-142979, A-142918, A-142960, A-142972, A-143113, A-143105, and A-142862.

[0016] In yet other embodiments, the nucleotide sequence is selected from the group consisting of A-142879, A-143094, A-142866, A-143010, A-143020, A-142949, A-142892, A-142863, A-143019, A-142976, A-142871, A-142991, A-142932, A-142854, A-142861, A-143007, A-142882, A-142933, A-142857, A-142897, and A-142889.

[0017] In some embodiments, substantially all of the nucleotides of the antisense polynucleotide agents of the invention are modified nucleotides. In other embodiments, all of the nucleotides of the antisense polynucleotide agents of the invention are modified nucleotides.

[0018] The antisense polynucleotide agent may be about 10 to 40 nucleotides in length; about 10 to 30 nucleotides in length; about 18 to 30 nucleotides in length; about 10 to 24 nucleotides in length; 18 to 24 nucleotides in length; 12 or 20 nucleotides in length.

[0019] In one embodiment, the modified nucleotide comprises a modified sugar moiety selected from the group consisting of a 2′-O-methoxyethyl modified sugar moiety, a 2′-methoxy modified sugar moiety, a 2′-O-alkyl modified sugar moiety, and a bicyclic sugar moiety.

[0020] In one embodiment, the bicyclic sugar moiety has a (—CRH—)n group forming a bridge between the 2′ oxygen and the 4′ carbon atoms of the sugar ring, wherein n is 1 or 2 and wherein R is H, CH₃ or CH₃OCH₃.

[0021] In a further embodiment, n is 1 and R is CH₃.

[0022] In another embodiment, the modified nucleotide is a 5-methylcytosine.

[0023] In one embodiment, the modified nucleotide comprises a modified internucleoside linkage, such as a phosphorothioate internucleoside linkage.

[0024] In one embodiment, an agent of the invention comprises a plurality, e.g., more than 1, e.g., 2, 3, 4, 5, 6, or 7, 2′-deoxynucleotides. In one embodiment, an agent of the invention comprises a plurality, e.g., more than 1, e.g., 2, 3, 4, 5, 6, or 7, 2′-deoxynucleotides flanked on each side by at least one nucleotide having a modified sugar moiety.

[0025] In one embodiment, the agent is a gapmer comprising a gap segment comprised of linked 2′-deoxynucleotides positioned between a 5′ and a 3′ wing segment.

[0026] In one embodiment, the modified sugar moiety is selected from the group consisting of a 2′-O-methoxyethyl modified sugar moiety, a 2′-methoxy modified sugar moiety, a 2′-O-alkyl modified sugar moiety, and a bicyclic sugar moiety.

[0027] In one embodiment, the 5′-wing segment is about 1 to 6 nucleotides in length, e.g., 2, 3, 4, or 5 nucleotides in length.

[0028] In one embodiment, the 3′-wing segment is about 1 to 6 nucleotides in length, e.g., 2, 3, 4, or 5 nucleotides in length.

[0029] In one embodiment, the gap segment is 5 to 14 nucleotides in length, e.g., 6, 7, 8, 9, 10, 11, 12, or 13 nucleotides in length. In one embodiment, the gap segment is 10 nucleotides in length.

[0030] In one aspect, the present invention provides antisense polynucleotide agents for inhibiting expression of a PD-L1 gene. The agents include a gap segment consisting of linked deoxynucleotides; a 5′-wing segment consisting of linked nucleotides; a 3′-wing segment consisting of linked nucleotides; wherein the gap segment is positioned between the 5′-wing segment and the 3′-wing segment and wherein each nucleotide of each wing segment comprises a modified sugar.

[0031] In one embodiment, the gap segment is ten 2′-deoxynucleotides in length and each of the wing segments is five nucleotides in length.

[0032] In another embodiment, the gap segment is ten 2′-deoxynucleotides in length and each of the wing segments is four nucleotides in length.

[0033] In yet another embodiment, the gap segment is ten 2′-deoxynucleotides in length and each of the wing segments is three nucleotides in length.

[0034] In another embodiment, the gap segment is ten 2′-deoxynucleotides in length and each of the wing segments is two nucleotides in length.

[0035] In one embodiment, the modified sugar moiety is selected from the group consisting of a 2′-O-methoxyethyl modified sugar moiety, a 2′-methoxy modified sugar moiety, a 2′-O-alkyl modified sugar moiety, and a bicyclic sugar moiety.

[0036] In some embodiments, the agents of the invention further comprise a ligand.

[0037] In one embodiment, the agent is conjugated to the ligand at the 3′-terminus.

[0038] In one embodiment, the ligand is an N-acetylgalactosamine (GalNAc) derivative.

[0039] In one embodiment, the ligand is

[chemical structure]

[0040] In one aspect, the present invention provides pharmaceutical compositions for inhibiting expression of a PD-L1 gene comprising the agents of the invention.

[0041] In one embodiment, the agent is present in an unbuffered solution, such as saline or water.

[0042] In another embodiment, the agent is present in a buffer solution, such as a buffer comprising acetate, citrate, prolamine, carbonate, or phosphate or any combination thereof.

[0043] In one embodiment, the buffer solution is phosphate buffered saline (PBS).

[0044] In another aspect, the present invention provides pharmaceutical composition comprising an agent of the invention and a lipid formulation, such as a lipid formulation comprising an LNP or a MC3.

[0045] In one aspect, the present invention provides methods of inhibiting PD-L1 expression in a cell. The methods include contacting the cell with the agent of the invention or a pharmaceutical composition of the invention; and maintaining the cell for a time sufficient to obtain antisense inhibition of a PD-L1 gene, thereby inhibiting expression of the PD-L1 gene in the cell.

[0046] In some embodiments, the cell is within a subject.

[0047] In some embodiments, the subject is a human. In some embodiments, the subject is not human.

[0048] In one embodiment, the PD-L1 expression is inhibited by at least 20%, 30%, 40%, 50%, 60%, 70%, 80%, 90%, 95%, or about 100%.

[0049] In another aspect, the present invention provides methods of treating a subject having a disease or disorder that would benefit from reduction in PD-L1 expression. The methods include administering to the subject a therapeutically effective amount of an agent of the invention or a pharmaceutical composition of the invention, thereby treating the subject.

[0050] In one embodiment, the administration of the antisense polynucleotide agent to the subject causes a decrease or normalization in one or more signs or symptoms of a PD-L1-associated disease, or a decrease in PD-L1 protein levels in the subject.

[0051] In one embodiment, the disorder or disease is a PD-L1-associated disease.

[0052] In one embodiment, the PD-L1-associated disease is an infection, especially a chronic, intracellular infection, e.g., viral infection, e.g., hepatitis virus infection, e.g., hepatitis B virus (HBV) infection or hepatitis D virus (HDV) infection. In one embodiment, the infection is a chronic bacterial infection, e.g., tuberculosis. In another embodiment, the PD-L1-associated disease is cancer, such as liver cancer, e.g., heptatocellular carcinoma (HCC).

[0053] In one embodiment, the PD-L1-associated disease is HBV.

[0054] In another embodiment, the Programmed cell death 1 ligand 1-associated disease is cancer. In one embodiment, the cancer is liver cancer.

[0055] In some embodiments the subject is human. In some embodiments, the subject is not human.

[0056] In some embodiments, the methods of the invention further include administering to the subject an additional therapeutic agent or therapeutic treatment suitable for treatment of a PD-L1-associated disease.

[0057] In certain embodiments, the invention further comprises administering an anti-viral agent to a subject with a PD-L1-associated disease. In certain embodiments, the anti-viral agent is a nucleotide or nucleoside analog. In certain embodiments, the anti-viral agent is for treatment of a hepatitis virus infection, e.g., an HBV infection, an HDV infection. In certain embodiments, the anti-viral agent is not an immune stimulatory agent.

[0058] In certain embodiments, the invention further comprises administering a chemotherapeutic agent to a subject with a PD-L1-associated disease.

[0059] In certain embodiments wherein the PD-L1-associated disease is cancer, the subject is further treated for cancer. In certain embodiments, the treatment for cancer includes surgery. In certain embodiments, the treatment for cancer includes radiation. In certain embodiments, the treatment for cancer includes administration of a chemotherapeutic agent.

[0060] In some embodiments, the methods of the invention further include measuring PD-L1 levels in the subject.

[0061] In some embodiments, the methods of the invention further include measuring the levels of indicators of infection, e.g., indicators of hepatic infection, such as HBV infection, in the subject.

[0062] In some embodiments, the methods of the invention further include measuring levels of the indicators associated with cancer in the subject.

### BRIEF DESCRIPTION OF THE DRAWINGS

[0063] FIG. 1 is a schematic showing a PD-L1 signaling between an antigen presenting cell and a T-cell.

### DETAILED DESCRIPTION OF THE INVENTION

[0064] The present invention provides polynucleotide agents, e.g., antisense polynucleotide agents, and compositions comprising such agents which target nucleic acids encoding Programmed cell death 1 ligand 1 (e.g., mRNA encoding PD-L1 as provided in, for example, any one of SEQ ID NOs:1-5). The polynucleotide agents bind to nucleic acids encoding PD-L1 via, e.g., Watson-Crick base pairing, and interfere with the normal function of the targeted nucleic acid.

[0065] The antisense polynucleotide agents of the invention include a nucleotide sequence which is 4 to 50 nucleotides or less in length and which is 80% complementary to at least part of an mRNA transcript of a PD-L1 gene. The use of these antisense polynucleotide agents enables the targeted inhibition of RNA expression or activity of a PD-L1 gene in mammals.

[0066] The present inventors have demonstrated that antisense polynucleotide agents targeting PD-L1 can mediate antisense inhibition in vitro resulting in significant inhibition of expression of a PD-L1 gene. Thus, methods and compositions including these antisense polynucleotide agents are useful for treating a subject who would benefit by a reduction in the levels or activity of a PD-L1 protein, such as a subject having a PD-L1-associated disease, such as an infectious disease, such as infection, e.g., a viral infection, e.g., a hepatitis virus infection, or cancer, such as a liver cancer, e.g., hepatocellular carcinoma (HCC), using iRNA compositions which effect RNA expression or activity of a PD-L1 gene.

[0067] The present invention also provides methods and combination therapies for treating a subject having a disorder that would benefit from inhibiting or reducing the expression of a PD-L1 gene, e.g., a PD-L1-associated disease, such as an infectious disease, such as a chronic, intracellular infectious disease or cancer, e.g., a hepatic cancer, using the antisense polynucleotide agents and compositions of the invention.

[0068] The combination therapies of the present invention include administering to a subject having a PD-L1-associated disease, an antisense polynucleotide agent of the invention and an additional therapeutic agent suitable for treating the condition, e.g., treatment for infection, e.g., HBV infection, or cancer.

[0069] The following detailed description discloses how to make and use antisense polynucleotide agents to inhibit the mRNA or protein expression of a PD-L1 gene, as well as compositions, uses, and methods for treating subjects having diseases and disorders that would benefit from inhibition or reduction of the expression of this gene.

### I. Definitions

[0070] In order that the present invention may be more readily understood, certain terms are first defined. In addition, it should be noted that whenever a value or range of values of a parameter are recited, it is intended that values and ranges intermediate to the recited values are also intended to be part of this invention.

[0071] The articles “a” and “an” are used herein to refer to one or to more than one (i.e., to at least one) of the grammatical object of the article. By way of example, “an element” means one element or more than one element, e.g., a plurality of elements.

[0072] The term “including” is used herein to mean, and is used interchangeably with, the phrase “including but not limited to”.

[0073] The term “or” is used herein to mean, and is used interchangeably with, the term “and/or,” unless context clearly indicates otherwise. For example, a nucleoside with a modified base or a modified sugar is understood to include the options of a nucleoside with a modified base, a nucleoside with a modified sugar, and a nucleoside with a modified base and a modified sugar.

[0074] The term “about” is used herein to mean within the typical ranges of tolerances in the art. For example, “about” can be understood as about 2 standard deviations from the mean. In certain embodiments, about means+10%. In certain embodiments, about means+5%. When about is present before a series of numbers or a range, it is understood that “about” can modify each of the numbers in the series or range.

[0075] The term “at least” prior to a number or series of numbers is understood to include the number adjacent to the term “at least”, and all subsequent numbers or integers that could logically be included, as clear from context. For example, the number of nucleotides in a nucleic acid molecule must be an integer. For example, “at least 17 nucleotides of a 20 nucleotide nucleic acid molecule” means that 17, 18, 19, or 20 nucleotides have the indicated property. When at least is present before a series of numbers or a range, it is understood that “at least” can modify each of the numbers in the series or range.

[0076] As used herein, “no more than” or “less than” is understood as the value adjacent to the phrase and logical lower values or integers, as logical from context, to zero. For example, a duplex with mismatches to a target site of “no more than 2 nucleotides” has a 2, 1, or 0 mismatches. When “no more than” is present before a series of numbers or a range, it is understood that “no more than” can modify each of the numbers in the series or range.

[0077] As used herein, “up to” as in “up to 10” is understood as up to and including 10, i.e., 0, 1, 2, 3, 4, 5, 6, 7, 8, 9, or 10.

[0078] Ranges provided herein are understood to include all individual integer values and all subranges within the ranges.

[0079] “Programmed cell death 1 ligand 1”, “PD-L1”, or “CD274,” also known as B7-H; B7H1; PDL1; PD-L1; PDCD1L1; PDCD1LG1, B7 homolog 1, PDCD1 ligand 1, and programmed cell death ligand 1, has been shown to be constitutively expressed on mouse T and B cells, DCs, macrophages, mesenchymal stem cells, and bone marrow—derived mast cells. PD-L1 expression is also found on a wide range of nonhematopoietic cells and is upregulated on a number of cell types after activation. Upon IFN-γ stimulation, PD-L1 is expressed on T cells, NK cells, macrophages, myeloid DCs, B cells, epithelial cells, and vascular endothelial cells (Flies D B and Chen L (2007) J Immunother. 30 (3): 251-60). PD-L1 is notably expressed on macrophages. Further information on PD-L1 is provided, for example in the NCBI Gene database at www.ncbi.nlm.nih.gov/gene/29126 (which is incorporated herein by reference as of the date of filing this application).

[0080] As used herein, “programmed cell death 1 ligand 1” is used interchangeably with the term “PD-L1” (and optionally any of the other recognized names listed above) refers to the naturally occurring gene that encodes a programmed cell death 1 ligand 1 protein. The amino acid and complete coding sequences of the reference sequence of the human PDL-1 gene may be found in, for example, GenBank Accession No. GI: 390979638 (RefSeq Accession No. NM_001267706.1; SEQ ID NO:1) and GenBank Accession No. GI: 292658763 (RefSeq Accession No. NM_014143.3; SEQ ID NO: 5). Further splice variants are provided, for example, in Grzywnowicz et al., PLoS One. 2012; 7:e35178 which is incorporated herein by reference. Mammalian orthologs of the human PD-L1 gene may be found in, for example, GI: 755563510 (RefSeq Accession No. XM_006527249.2, mouse; SEQ ID NO: 2); GI: 672040129 (RefSeq Accession No. XM_006231248.2, rat; SEQ ID NO: 3); GenBank Accession Nos. GI: 544494555 (RefSeq Accession No. XM_005581779.1, cynomolgus monkey; SEQ ID NO: 4).

[0081] A number of naturally occurring SNPs are known and can be found, for example, in the SNP database at the NCBI at www.ncbi.nlm.nih.gov/SNP/snp_ref_cgi?locusId=29126 (which is incorporated herein by reference as of the date of filing this application) which lists SNPs in human PD-L1. In preferred embodiments, such naturally occurring variants are included within the scope of the PD-L1 gene sequence.

[0082] Additional examples of PD-L1 mRNA sequences are readily available using publicly available databases, e.g., GenBank, UniProt, and OMIM.

[0083] As used herein, “target sequence” refers to a contiguous portion of the nucleotide sequence of an mRNA molecule formed during the transcription of a PD-L1 gene, including mRNA that is a product of RNA processing of a primary transcription product. The target portion of the sequence will be at least long enough to serve as a substrate for antisense oligonucleotide-directed cleavage at or near that portion of the nucleotide sequence of an mRNA molecule formed during the transcription of a PD-L1 gene. In one embodiment, the target sequence is within the protein coding region of PD-L1.

[0084] The target sequence may be from about 9-36 nucleotides in length, e.g., about 15-30 nucleotides in length. For example, the target sequence can be from about 15-30 nucleotides, 15-29, 15-28, 15-27, 15-26, 15-25, 15-24, 15-23, 15-22, 15-21, 15-20, 15-19, 15-18, 15-17, 18-30, 18-29, 18-28, 18-27, 18-26, 18-25, 18-24, 18-23, 18-22, 18-21, 18-20, 19-30, 19-29, 19-28, 19-27, 19-26, 19-25, 19-24, 19-23, 19-22, 19-21, 19-20, 20-30, 20-29, 20-28, 20-27, 20-26, 20-25, 20-24, 20-23, 20-22, 20-21, 21-30, 21-29, 21-28, 21-27, 21-26, 21-25, 21-24, 21-23, or 21-22 nucleotides in length. Ranges and lengths intermediate to the above recited ranges and lengths are also contemplated to be part of the invention.

[0085] The terms “antisense polynucleotide agent” “antisense compound”, and “agent” as used interchangeably herein, refer to an agent comprising a single-stranded oligonucleotide that contains RNA as that term is defined herein, and which targets nucleic acid molecules encoding PD-L1 (e.g., mRNA encoding PD-L1 as provided in, for example, any one of SEQ ID NOs:1-5). The antisense polynucleotide agents specifically bind to the target nucleic acid molecules via hydrogen bonding (e.g., Watson-Crick, Hoogsteen, or reversed Hoogsteen hydrogen bonding) and interfere with the normal function of the targeted nucleic acid (e.g., by an antisense mechanism of action). This interference with or modulation of the function of a target nucleic acid by the polynucleotide agents of the present invention is referred to as “antisense inhibition.”

[0086] The functions of the target nucleic acid molecule to be interfered with may include functions such as, for example, translocation of the RNA to the site of protein translation, translation of protein from the RNA, splicing of the RNA to yield one or more mRNA species, and catalytic activity which may be engaged in or facilitated by the RNA.

[0087] In some embodiments, antisense inhibition refers to “inhibiting the expression” of target nucleic acid levels or target protein levels in a cell, e.g., a cell within a subject, such as a mammalian subject, in the presence of the antisense polynucleotide agent complementary to a target nucleic acid as compared to target nucleic acid levels or target protein levels in the absence of the antisense polynucleotide agent. For example, the antisense polynucleotide agents of the invention can inhibit translation in a stoichiometric manner by base pairing to the mRNA and physically obstructing the translation machinery, see Dias, N. et al., (2002) Mol Cancer Ther 1:347-355.

[0088] As used herein, “target sequence” refers to a contiguous portion of the nucleotide sequence of an mRNA molecule formed during the transcription of a PD-L1 gene, including mRNA that is a product of RNA processing of a primary transcription product.

[0089] As used herein, “target nucleic acid” refers to a nucleic acid molecule to which an antisense polynucleotide agent specifically hybridizes.

[0090] As used herein, the term “specifically hybridizes” refers to an antisense polynucleotide agent having a sufficient degree of complementarity between the antisense polynucleotide agent and a target nucleic acid to induce a desired effect, while exhibiting minimal or no effects on non-target nucleic acids under conditions in which specific binding is desired, e.g., under physiological conditions in the case of in vivo assays and therapeutic treatments.

[0091] A target sequence may be about 4-50 nucleotides in length, e.g., about 8-45, 10-45, 10-40, 10-35, 10-30, 10-20, 11-45, 11-40, 11-35, 11-30, 11-20, 12-45, 12-40, 12-35, 12-30, 12-25, 12-20, 13-45, 13-40, 13-35, 13-30, 13-25, 13-20, 14-45, 14-40, 14-35, 14-30, 14-25, 14-20, 15-45, 15-40, 15-35, 15-30, 15-25, 15-20, 16-45, 16-40, 16-35, 16-30, 16-25, 16-20, 17-45, 17-40, 17-35, 17-30, 17-25, 17-20, 18-45, 18-40, 18-35, 18-30, 18-25, 18-20, 19-45, 19-40, 19-35, 19-30, 19-25, 19-20, e.g., 4, 5, 6, 7, 8, 9, 10, 11, 12, 13, 14, 15, 16, 17, 18, 19, 20, 21, 22, 23, 24, 25, 26, 27, 28, 29, 30, 31, 32, 33, 34, 35, 36, 37, 38, 39, 40, 41, 42, 43, 44, 45, 46, 47, 48, 49, or 50 contiguous nucleotides of the nucleotide sequence of an mRNA molecule formed during the transcription of a PD-L1 gene. Ranges and lengths intermediate to the above recited ranges and lengths are also contemplated to be part of the invention.

[0092] The terms “complementary,” “fully complementary” and “substantially complementary” are used herein with respect to the base matching between an antisense polynucleotide agent and a target sequence. The term“complementarity” refers to the capacity for pairing between nucleobases of a first nucleic acid and a second nucleic acid.

[0093] As used herein, an antisense polynucleotide agent that is “substantially complementary to at least part of” a messenger RNA (mRNA) refers to an antisense polynucleotide agent that is substantially complementary to a contiguous portion of the mRNA of interest (e.g., an mRNA encoding PD-L1). For example, a polynucleotide is complementary to at least a part of a PD-L1 mRNA if the sequence is substantially complementary to a non-interrupted portion of an mRNA encoding PD-L1.

[0094] As used herein, the term “region of complementarity” refers to the region of the antisense polynucletiode agent that is substantially complementary to a sequence, for example a target sequence, e.g., a PD-L1 nucleotide sequence, as defined herein. Where the region of complementarity is not fully complementary to the target sequence, the mismatches can be in the internal or terminal regions of the molecule. Generally, the most tolerated mismatches are in the terminal regions, e.g., within 5, 4, 3, or 2 nucleotides of the 5′- or 3′-terminus of the antisense polynucleotide.

[0095] As used herein, and unless otherwise indicated, the term “complementary,” when used to describe a first nucleotide sequence in relation to a second nucleotide sequence, refers to the ability of a polynucleotide comprising the first nucleotide sequence to hybridize and form a duplex structure under certain conditions with the second nucleotide sequence, as will be understood by the skilled person. Such conditions can, for example, be stringent conditions, where stringent conditions can include: 400 mM NaCl, 40 mM PIPES pH 6.4, 1 mM EDTA, 50° C. or 70° C. for 12-16 hours followed by washing (see, e.g., “Molecular Cloning: A Laboratory Manual, Sambrook, et al. (1989) Cold Spring Harbor Laboratory Press). Other conditions, such as physiologically relevant conditions as can be encountered inside an organism, can apply. The skilled person will be able to determine the set of conditions most appropriate for a test of complementarity of two sequences in accordance with the ultimate application of the nucleotides.

[0096] Complementary sequences include those nucleotide sequences of an antisense polynucleotide agent of the invention that base-pair to a second nucleotide sequence over the entire length of one or both nucleotide sequences. Such sequences can be referred to as “fully complementary” with respect to each other herein. However, where a first sequence is referred to as “substantially complementary” with respect to a second sequence herein, the two sequences can be fully complementary, or they can form one or more, but generally not more than 5, 4, 3, or 2 mismatched base pairs upon hybridization for a duplex up to 30 base pairs, while retaining the ability to hybridize under the conditions most relevant to their ultimate application, e.g., antisense inhibition of target gene expression.

[0097] “Complementary” sequences, as used herein, can also include, or be formed entirely from, non-Watson-Crick base pairs or base pairs formed from non-natural and modified nucleotides, in so far as the above requirements with respect to their ability to hybridize are fulfilled. Such non-Watson-Crick base pairs include, but are not limited to, G:U Wobble or Hoogstein base pairing.

[0098] As used herein, the term “strand comprising a sequence” refers to an oligonucleotide comprising a chain of nucleotides that is described by the sequence referred to using the standard nucleotide nomenclature.

[0099] “G,” “C,” “A,” “T,” and “U” each generally stand for a nucleotide that contains guanine, cytosine, adenine, thymidine and uracil as a base, respectively. However, it will be understood that the terms “deoxyribonucleotide”, “ribonucleotide” and “nucleotide” can also refer to a modified nucleotide, as further detailed below, or a surrogate replacement moiety (see, e.g., Table 2). The skilled person is well aware that guanine, cytosine, adenine, and uracil can be replaced by other moieties without substantially altering the base pairing properties of an oligonucleotide comprising a nucleotide bearing such replacement moiety. For example, without limitation, a nucleotide comprising inosine as its base can base pair with nucleotides containing adenine, cytosine, or uracil. Hence, nucleotides containing uracil, guanine, or adenine can be replaced in the nucleotide sequences of the agents featured in the invention by a nucleotide containing, for example, inosine. In another example, adenine and cytosine anywhere in the oligonucleotide can be replaced with guanine and uracil, respectively to form G-U Wobble base pairing with the target mRNA. Sequences containing such replacement moieties are suitable for the compositions and methods featured in the invention.

[0100] A “nucleoside” is a base-sugar combination. The “nucleobase” (also known as “base”) portion of the nucleoside is normally a heterocyclic base moiety. “Nucleotides” are nucleosides that further include a phosphate group covalently linked to the sugar portion of the nucleoside. For those nucleosides that include a pentofuranosyl sugar, the phosphate group can be linked to the 2′, 3′, or 5′ hydroxyl moiety of the sugar. “Polynucleotides,” also referred to as “oligonucleotides,” are formed through the covalent linkage of adjacent nucleosides to one another, to form a linear polymeric oligonucleotide. Within the polynucleotide structure, the phosphate groups are commonly referred to as forming the internucleoside linkages of the polynucleotide.

[0101] In general, the majority of nucleotides of the antisense polynucleotide agents are ribonucleotides, but as described in detail herein, the agents may also include one or more non-ribonucleotides, e.g., a deoxyribonucleotide. In addition, as used in this specification, an “antisense polynucleotide agent” may include nucleotides (e.g., ribonucleotides or deoxyribonucleotides) with chemical modifications; an antisense polynucleotide agent may include substantial modifications at multiple nucleotides.

[0102] As used herein, the term “modified nucleotide” refers to a nucleotide having, independently, a modified sugar moiety, a modified internucleotide linkage, or modified nucleobase. Thus, the term modified nucleotide encompasses substitutions, additions or removal of, e.g., a functional group or atom, to internucleoside linkages, sugar moieties, or nucleobases. The modifications suitable for use in the antisense polynucleiotde agents of the invention include all types of modifications disclosed herein or known in the art. Any such modifications, as used in nucleotides, are encompassed by “antisense polynucleotide agent” for the purposes of this specification and claims.

[0103] As used herein, a “subject” is an animal, such as a mammal, including a primate (such as a human, a non-human primate, e.g., a monkey, and a chimpanzee), a non-primate (such as a cow, a pig, a camel, a llama, a horse, a goat, a rabbit, a sheep, a hamster, a guinea pig, a cat, a dog, a rat, a mouse, a horse, and a whale), or a bird (e.g., a duck or a goose). In an embodiment, the subject is a human, such as a human being treated or assessed for a disease, disorder, or condition that would benefit from reduction in PD-L1 expression; a human at risk for a disease, disorder, or condition that would benefit from reduction in PD-L1 expression; or a human having a disease, disorder or condition that would benefit from reduction in PD-L1 expression.

[0104] As used herein, the terms “treating” or “treatment” refer to a beneficial or desired result including, but not limited to, alleviation or amelioration of one or more symptoms associated with a PD-L1-associated disease. “Treatment” can also mean prolonging survival as compared to expected survival in the absence of treatment.

[0105] The term “lower” or “reduce” and the like in the context of the level of a PD-L1 in a subject or a disease marker or symptom refers to a statistically significant decrease in such level. The decrease can be, for example, at least 20%, 25%, 30%, 35%, 40%, 45%, 50%, 55%, 60%, 65%, 70%, 75%, 80%, 85%, 90%, or 95%. In certain embodiments, the decrease is down to a level accepted as within the range of normal for an individual without such disorder which can also be referred to as a normalization of a level. For example, lowering cholesterol to 180 mg/dl or lower would be considered to be within the range of normal for a subject. A subject having a cholesterol level of 230 mg/dl with a cholesterol level decreased to 210 mg/dl would have a cholesterol level that was decreased by 40% (230-210/230-180=20/50=40% reduction). In certain embodiments, the reduction is the normalization of the level of a sign or symptom of a disease, a reduction in the difference between the subject level of a sign of the disease and the normal level of the sign for the disease (e.g., upper level of normal, lower level of normal, average of upper and lower level of normal). For example, reduction can be understood as normalization of blood pressure, decreasing an elevated blood pressure or increasing a low blood pressure to reduce the difference from a normal reading. In certain embodiments, the methods include a clinically relevant inhibition of expression of PD-L1, e.g. as demonstrated by a clinically relevant outcome after treatment of a subject with an agent to reduce the expression of PD-L1.

[0106] As used herein, the term “Programmed cell death 1 ligand 1-associated disease” or “PD-L1-associated disease,” is a disease or disorder that is caused by, or associated with PD-L1 gene expression or PD-L1 protein production. The term “PD-L1-associated disease” includes a disease, disorder or condition that would benefit from a decrease in PD-L1 gene expression, replication, or protein activity. Non-limiting examples of PD-L1-associated diseases include, for example, infection, especially a chronic intracellular infection, e.g., viral infection, e.g., hepatitis infection, or cancer.

[0107] In certain embodiments, a PD-L1-associated disease is infection, especially a chronic, intracellular infection, e.g., viral infection, e.g., hepatitis virus infection, e.g., hepatitis B infection or hepatitis D infection. In certain embodiments, the infection is a chronic bacterial infection, e.g., tuberculosis. In certain embodiments, a PD-L1-associated disease is cancer, especially liver cancer, e.g., heptatocellular carcinoma (HCC).

[0108] “Therapeutically effective amount,” as used herein, is intended to include the amount of a polynucleotide agent that, when administered to a patient for treating a subject having an infection, especially a chronic intracellular infection, or cancer, or other PD-L1-associated disease, is sufficient to effect treatment of the disease (e.g., by diminishing, ameliorating or maintaining the existing disease or one or more symptoms of disease or its related comorbidities). The “therapeutically effective amount” may vary depending on the polynucleotide agent, how it is administered, the disease and its severity and the history, age, weight, family history, genetic makeup, stage of pathological processes mediated by PD-L1 gene expression, the types of preceding or concomitant treatments, if any, and other individual characteristics of the patient to be treated.

[0109] A “therapeutically-effective amount” also includes an amount of a polynuc leotide agent that produces some desired local or systemic effect at a reasonable benefit/risk ratio applicable to any treatment. P;olynucleotide agents employed in the methods of the present invention may be administered in a sufficient amount to produce a reasonable benefit/risk ratio applicable to such treatment. A therapeutically effective amount includes an amount that results in a clinically relevant change or stabilization, as appropriate, of an indicator of a disease or condition.

### II. Antisense Polynucleotide Agents of the Invention

[0110] The present invention provides antisense polynucleotide agents, and compositions comprising such agents, which target a PD-L1 gene and inhibit the expression of the PD-L1 gene. In one embodiment, the antisense polynucleotide agents inhibit the expression of a PD-L1 gene in a cell, such as a cell within a subject, e.g., a mammal, such as a human having a PD-L1-associated disease, e.g., infection, especially a chronic intracellular infection, e.g., viral infection, e.g., hepatitis infection, or cancer.

[0111] The antisense polynucleotde agents of the invention include a region of complementarity which is complementary to at least a part of an mRNA formed in the expression of a PD-L1 gene. The region of complementarity may be about 50 nucleotides or less in length (e.g., 22-12, 20-14, 50, 49, 48, 47, 46, 45, 44, 43, 42, 41, 40, 39, 38, 37, 36, 35, 34, 33, 32, 31, 30, 29, 28, 27, 26, 25, 24, 23, 22, 21, 20, 19, 18, 17, 16, 15, 14, 13, 12, 11, 10, 9, 8, 7, 6, 5, or 4 nucleotides or less in length). Upon contact with a cell expressing the PD-L1 gene, the antisense polynucleotide agent inhibits the expression of the PD-L1 gene (e.g., a human, a primate, a non-primate, or a bird PD-L1 gene) by at least 20% as assayed by, for example, a PCR or branched DNA (bDNA)-based method, or by a protein-based method, such as by immunofluorescence analysis, using, for example, western blotting, or flow cytometric techniques. In one embodiments, the inhibition of PD-L1 expression is determined using a qPCR method, such as the provided in Example 2, below.

[0112] The region of complementarity between an antisense polynucleotide agent and a target sequence may be substantially complementary (e.g., there is a sufficient degree of complementarity between the antisense polynucleotide agent and a target nucleic acid to so that they specifically hybridize and induce a desired effect), but is generally fully complementary to the target sequence. The target sequence can be derived from the sequence of an mRNA formed during the expression of a PD-L1 gene.

[0113] Accordingly, in one aspect, an antisense polynucleotide agent of the invention specifically hybridizes to a target nucleic acid molecule, such as the mRNA encoding PD-L1, and comprises a contiguous nucleotide sequence which corresponds to the reverse complement of a nucleotide sequence of any one of SEQ ID NOs:1-5, or a fragment of any one of SEQ ID NOs:1-5.

[0114] In some embodiments, the antisense polynucleotide agents of the invention may be substantially complementary to the target sequence. For example, an antisense polynucleotide agent that is substantially complementary to the target sequence may include a contiguous nucleotide sequence comprising no more than 5 mismatches (e.g., no more than 1, no more than 2, no more than 3, no more than 4, or no more than 5 mismatches) when hybridizing to a target sequence, such as to the corresponding region of a nucleic acid which encodes a mammalian PD-L1 mRNA. In some embodiments, the contiguous nucleotide sequence comprises no more than a single mismatch when hybridizing to the target sequence, such as the corresponding region of a nucleic acid which encodes a mammalian PD-L1 mRNA.

[0115] In some embodiments, the antisense polynucleotide agents of the invention that are substantially complementary to the target sequence comprise a contiguous nucleotide sequence which is at least 80% complementary over its entire length to the equivalent region of the nucleotide sequence of any one of SEQ ID NOs:1-5, or a fragment of any one of SEQ ID NOs:1-5, such as about 85%, about 86%, about 87%, about 88%, about 89%, about 90%, about % 91%, about 92%, about 93%, about 94%, about 95%, about 96%, about 97%, about 98%, or about 99% complementary.

[0116] In some embodiments, an antisense polynucleotide agent comprises a contiguous nucleotide sequence which is fully complementary over its entire length to the equivalent region of the nucleotide sequence of any one of SEQ ID NOs: 1-5 (or a fragment of any one of SEQ ID NOs:1-5). For example, the nucleotide sequence of an antisense polynucleotide agent is fully complementary over its entire length to the equivalent region of nucleotides 1-of GenBank Accession No. GI: 390979638 (SEQ ID NO:1) (see, e.g., Table 3).

[0117] An antisense polynucleotide agent may comprise a contiguous nucleotide sequence of about 4 to 50 nucleotides in length, or any subrange falling within that range, e.g., about 8-49, 8-48, 8-47, 8-46, 8-45, 8-44, 8-43, 8-42, 8-41, 8-40, 8-39, 8-38, 8-37, 8-36, 8-35, 8-34, 8-33, 8-32, 8-31, 8-30, 8-29, 8-28, 8-27, 8-26, 8-25, 8-24, 8-23, 8-22, 8-21, 8-20, 8-19, 8-18, 8-17, 8-16, 8-15, 8-14, 8-13, 8-12, 8-11, 8-10, 8-9, 10-49, 10-48, 10-47, 10-46, 10-45, 10-44, 10-43, 10-42, 10-41, 10-40, 10-39, 10-38, 10-37, 10-36, 10-35, 10-34, 10-33, 10-32, 10-31, 10-30, 10-29, 10-28, 10-27, 10-26, 10-25, 10-24, 10-23, 10-22, 10-21, 10-20, 10-19, 10-18, 10-17, 10-16, 10-15, 10-14, 10-13, 10-12, 10-11,11-49, 11-48, 11-47, 11-46, 11-45, 11-44, 11-43, 11-42, 11-41, 11-40, 11-39, 11-38, 11-37, 11-36, 11-35, 11-34, 11-33, 11-32, 11-31, 11-30, 11-29, 11-28, 11-27, 11-26, 11-25, 11-24, 11-23, 11-22, 11-21, 11-20, 11-19, 11-18, 11-17, 11-16, 11-15, 11-14, 11-13, 11-12, 12-49, 12-48, 12-47, 12-46, 12-45, 12-44, 12-43, 12-42, 12-41, 12-40, 12-39, 12-38, 12-37, 12-36, 12-35, 12-34, 12-33, 12-32, 12-31, 12-30, 12-29, 12-28, 12-27, 12-26, 12-25, 12-24, 12-23, 12-22, 12-21, 12-20, 12-19, 12-18, 12-17, 12-16, 12-15, 12-14, 12-13, 13-49, 13-48, 13-47, 13-46, 13-45, 13-44, 13-43, 13-42, 13-41, 13-40, 13-39, 13-38, 13-37, 13-36, 13-35, 13-34, 13-33, 13-32, 13-31, 13-30, 13-29, 13-28, 13-27, 13-26, 13-25, 13-24, 13-23, 13-22, 13-21, 13-20, 13-19, 13-18, 13-17, 13-16, 13-15, 13-14, 14-49, 14-48, 14-47, 14-46, 14-45, 14-44, 14-43, 14-42, 14-41, 14-40, 14-39, 14-38, 14-37, 14-36, 14-35, 14-34, 14-33, 14-32, 14-31, 14-30, 14-29, 14-28, 14-27, 14-26, 14-25, 14-24, 14-23, 14-22, 14-21, 14-20, 14-19, 14-18, 14-17, 14-16, 14-15, 15-49, 15-48, 15-47, 15-46, 15-45, 15-44, 15-43, 15-42, 15-41, 15-40, 15-39, 15-38, 15-37, 15-36, 15-35, 15-34, 15-33, 15-32, 15-31, 15-30, 15-29, 15-28, 15-27, 15-26, 15-25, 15-24, 15-23, 15-22, 15-21, 15-20, 15-19, 15-18, 15-17, 15-16,16-49, 16-48, 16-47, 16-46, 16-45, 16-44, 16-43, 16-42, 16-41, 16-40, 16-39, 16-38, 16-37, 16-36, 16-35, 16-34, 16-33, 16-32, 16-31, 16-30, 16-29, 16-28, 16-27, 16-26, 16-25, 16-24, 16-23, 16-22, 16-21, 16-20, 16-19, 16-18, 16-17, 17-49, 17-48, 17-47, 17-46, 17-45, 17-44, 17-43, 17-42, 17-41, 17-40, 17-39, 17-38, 17-37, 17-36, 17-35, 17-34, 17-33, 17-32, 17-31, 17-30, 17-29, 17-28, 17-27, 17-26, 17-25, 17-24, 17-23, 17-22, 17-21, 17-20, 17-19, 17-18, 18-49, 18-48, 18-47, 18-46, 18-45, 18-44, 18-43, 18-42, 18-41, 18-40, 18-39, 18-38, 18-37, 18-36, 18-35, 18-34, 18-33, 18-32, 18-31, 18-30, 18-29, 18-28, 18-27, 18-26, 18-25, 18-24, 18-23, 18-22, 18-21, 18-20, 19-49, 19-48, 19-47, 19-46, 19-45, 19-44, 19-43, 19-42, 19-41, 19-40, 19-39, 19-38, 19-37, 19-36, 19-35, 19-34, 19-33, 19-32, 19-31, 19-30, 19-29, 19-28, 19-27, 19-26, 19-25, 19-24, 19-23, 19-22, 19-21, 19-20, 20-49, 20-48, 20-47, 20-46, 20-45, 20-44, 20-43, 20-42, 20-41, 20-40, 20-39, 20-38, 20-37, 20-36, 20-35, 20-34, 20-33, 20-32, 20-31, 20-30, 20-29, 20-28, 20-27, 20-26, 20-25, 20-24,20-23, 20-22, 20-21, 21-49, 21-48, 21-47, 21-46, 21-45, 21-44, 21-43, 21-42, 21-41, 21-40, 21-39, 21-38, 21-37, 21-36, 21-35, 21-34, 21-33, 21-32, 21-31, 21-30, 21-29, 21-28, 21-27, 21-26, 21-25, 21-24, 21-23, 21-22, 22-49, 22-48, 22-47, 22-46, 22-45, 22-44, 22-43, 22-42, 22-41, 22-40, 22-39, 22-38, 22-37, 22-36, 22-35, 22-34, 22-33, 22-32, 22-31, 22-30, 22-29, 22-28, 22-27, 22-26, 22-25, 22-24, 22-23, 23-49, 23-48, 23-47, 23-46, 23-45, 23-44, 23-43, 23-42, 23-41, 23-40, 23-39, 23-38, 23-37, 23-36, 23-35, 23-34, 23-33, 23-32, 23-31, 23-30, 23-29, 23-28, 23-27, 23-26, 23-25, 23-24, 24-49, 24-48, 24-47, 24-46, 24-45, 24-44, 24-43, 24-42, 24-41, 24-40, 24-39, 24-38, 24-37, 24-36, 24-35, 24-34, 24-33, 24-32, 24-31, 24-30, 24-29, 24-28, 24-27, 24-26, 24-25, 25-49, 25-48, 25-47, 25-46, 25-45, 25-44, 25-43, 25-42, 25-41, 25-40, 25-39, 25-38, 25-37, 25-36, 25-35, 25-34, 25-33, 25-32, 25-31, 25-30, 25-29, 25-28, 25-27, 25-26,26-49, 26-48, 26-47, 26-46, 26-45, 26-44, 26-43, 26-42, 26-41, 26-40, 26-39, 26-38, 26-37, 26-36, 26-35, 26-34, 26-33, 26-32, 26-31, 26-30, 26-29, 26-28, 26-27, 27-49, 27-48, 27-47, 27-46, 27-45, 27-44, 27-43, 27-42, 27-41, 27-40, 27-39, 27-38, 27-37, 27-36, 27-35, 27-34, 27-33, 27-32, 27-31, 27-30, 27-29, 27-28, 28-49, 28-48, 28-47, 28-46, 28-45, 28-44, 28-43, 28-42, 28-41, 28-40, 28-39, 28-38, 28-37, 28-36, 28-35, 28-34, 28-33, 28-32, 28-31, 28-30, 28-29, 29-49, 29-48, 29-47, 29-46, 29-45, 29-44, 29-43, 29-42, 29-41, 29-40, 29-39, 29-38, 29-37, 29-36, 29-35, 29-34, 29-33, 29-32, 29-31, 29-30, 30-49, 30-48, 30-47, 30-46, 30-45, 30-44, 30-43, 30-42, 30-41, 30-40, 30-39, 30-38, 30-37, 30-36, 30-35, 30-34, 30-33, 30-32, or 30-31 nucleotides in length, e.g., 4, 5, 6, 7, 8, 9, 10, 11, 12, 13, 14, 15, 16, 17, 18, 19, 20, 21, 22, 23, 24, 25, 26, 27, 28, 29, 30, 31, 32, 33, 34, 35, 36, 37, 38, 39, 40, 41, 42, 43, 44, 45, 46, 47, 48, 49, or 50 nucleotides in length.

[0118] In some embodiments, an antisense polynucleotide agent may comprise a contiguous nucleotide sequence of no more than 22 nucleotides, e.g., no more than any of 21 nucleotides, nucleotides, 19 nucleotides, no more than 18 nucleotides, 17 nucleotides, 16 nucleotides, than 15 nucleotides, or 14 nucleotides. In other embodiments, the antisense polynucleotide agents of the invention are 20 nucleotides in length. In other embodiments, the antisense polynucleotide agents of the invention are 14 nucleotides in length. In certain embodiments, the polynucleotide is at least 12 nucleotides in length.

[0119] In one aspect, an antisense polynucleotide agent of the invention includes a sequence selected from the group of sequences provided in Table 3. It will be understood that, although some of the sequences in Table 3 are described as modified or conjugated sequences, an antisense polynucleotide agent of the invention, may also comprise any one of the sequences set forth in Table 3 that is un-modified, un-conjugated, or modified or conjugated differently than described therein.

[0120] By virtue of the nature of the nucleotide sequences provided in Table 3, antisense polynucleotide agents of the invention may include one of the sequences of Table 3 minus only a few nucleotides on one or both ends and yet remain similarly effective as compared to the antisense polynucleotide agents described above. Hence, antisense polynucleotide agents having a sequence of at least 4, 5, 6, 7, 8, 9, 10, 11, 12, 13, 14,15, 16, 17, 18, 19, or 20 contiguous nucleotides derived from one of the sequences of Table 3 and differing in their ability to inhibit the expression of a PD-L1 gene by not more than 5, 10, 15, 20, 25, or 30% inhibition from an antisense polynucleotide agent comprising the full sequence, are contemplated to be within the scope of the present invention.

[0121] In addition, the antisense polynucleotide agents provided in Table 3 identify a region(s) in a PD-L1 transcript that is susceptible to antisense inhibition (e.g., the regions encompassed by the start and end positions relative to target sites 10-29; 44-75; 44-141; 78-141; 187-305; 309-349; 351-467; 309-467; 472-503; 505-570; 472-570; 571-590; 505-590; 606-647; 681-755; 769-788; 793-811; 815-834; 859-911; 1000-1019; 1044-1076; 1100-1152; 1177-1196; 1211-1241; 1242-1261; 1211-1261; 1277-1307; 1309-1328; 1277-1328; 1342-1373; 1374-1407; 1418-1450; 1462-1493; 1497-1582; 1650-1713; 1650-1756; 1716-1756; 1781-1879; 1915-1945; 1958-1977; 1990-2009; 2112-2131; 2167-2186; 2211-2230; 2288-2307; 2332-2351; 2364-2383; 2552-2571; 2575-2594; 2552-2594; 2652-2671; 2739-2801; 2826-2878; 2904-2933; 2970-2989; 3013-3032; 3035-3054; 3113-3142; 3158-3199 of SEQ ID NO:1, as well as target sites in Table 3). As such, the present invention further features antisense polynucleotide agents that target within one of these sites. As used herein, an antisense polynucleotide agent is said to target within a particular site of an RNA transcript if the antisense polynucleotide agent promotes antisense inhibition of the target at that site. Such an antisense polynucleotide agent will generally include at least 14 contiguous nucleotides from one of the sequences provided in Table 3 coupled to additional nucleotide sequences taken from the region contiguous to the selected sequence in a PD-L1 gene.

[0122] While a target sequence is generally 4-50 nucleotides in length, there is wide variation in the suitability of particular sequences in this range for directing antisense inhibition of any given target RNA. Various software packages and the guidelines set out herein provide guidance for the identification of optimal target sequences for any given gene target, but an empirical approach can also be taken in which a “window” or “mask” of a given size (as a non-limiting example, 20 nucleotides) is literally or figuratively (including, e.g., in silico) placed on the target RNA sequence to identify sequences in the size range that can serve as target sequences. By moving the sequence “window” progressively one nucleotide upstream or downstream of an initial target sequence location, the next potential target sequence can be identified, until the complete set of possible sequences is identified for any given target size selected. This process, coupled with systematic synthesis and testing of the identified sequences (using assays as described herein or as known in the art) to identify those sequences that perform optimally can identify those RNA sequences that, when targeted with an anti sense polynucleotide agent, mediate the best inhibition of target gene expression. Thus, while the sequences identified, for example, in Table 3 represent effective target sequences, it is contemplated that further optimization of antisense inhibition efficiency can be achieved by progressively “walking the window” one nucleotide upstream or downstream of the given sequences to identify sequences with equal or better inhibition characteristics.

[0123] Further, it is contemplated that for any sequence identified, e.g., in Table 3, further optimization could be achieved by systematically either adding or removing nucleotides to generate longer or shorter sequences and testing those sequences generated by walking a window of the longer or shorter size up or down the target RNA from that point. Again, coupling this approach to generating new candidate targets with testing for effectiveness of antisense polynucleotide agents based on those target sequences in an inhibition assay as known in the art or as described herein can lead to further improvements in the efficiency of inhibition. Further still, such optimized sequences can be adjusted by, e.g., the introduction of modified nucleotides as described herein or as known in the art, addition or changes in length, or other modifications as known in the art or discussed herein to further optimize the molecule (e.g., increasing serum stability or circulating half-life, increasing thermal stability, enhancing transmembrane delivery, targeting to a particular location or cell type, increasing interaction with silencing pathway enzymes, increasing release from endosomes) as an expression inhibitor.

### III. Modified Antisense Polynucleotide Agents of the Invention

[0124] In some embodiments, the nucleotides of an antisense polynucleotide agent of the invention are un-modified, and do not comprise, e.g., chemical modifications or conjugations known in the art and described herein. In another embodiment, at least one of the nucleotides of an anti sense polynucleotide agent of the invention is chemically modified to enhance stability or other beneficial characteristics. In certain embodiments of the invention, substantially all of the nucleotides of an antisense polynucleotide agent of the invention are modified. In other embodiments of the invention, all of the nucleotides of an antisense polynucleotide agent of the invention are modified. Antisense polynucleotide agents of the invention in which “substantially all of the nucleotides are modified” are largely but not wholly modified and can include not more than 5, 4, 3, 2, or 1 unmodified nucleotides.

[0125] The nucleic acids featured in the invention can be synthesized or modified by standard methods known in the art as further discussed below, e.g., solution-phase or solid-phase organic synthesis or both, e.g., by use of an automated DNA synthesizer, such as are commercially available from, for example, Biosearch, Applied Biosystems, Inc. Well-established methods for the synthesis or modification of the nucleic acids featured in the invention are described in, for example, “Current protocols in nucleic acid chemistry,” Beaucage, S. L. et al. (Edrs.), John Wiley & Sons, Inc., New York, NY, USA, which is hereby incorporated herein by reference. Modifications include, for example, end modifications, e.g., 5′-end modifications (phosphorylation, conjugation, inverted linkages) or 3′-end modifications (conjugation, DNA nucleotides, inverted linkages, etc.); base modifications, e.g., replacement with stabilizing bases, destabilizing bases, or bases that base pair with an expanded repertoire of partners, removal of bases (abasic nucleotides), or conjugated bases; sugar modifications (e.g., at the 2′-position or 4′-position) or replacement of the sugar; or backbone modifications, including modification or replacement of the phosphodiester linkages.

[0126] Specific examples of modified nucleotides useful in the embodiments described herein include, but are not limited to nucleotides containing modified backbones or no natural internucleoside linkages. Nucleotides having modified backbones include, among others, those that do not have a phosphorus atom in the backbone. For the purposes of this specification, and as sometimes referenced in the art, modified nucleotides that do not have a phosphorus atom in their internucleoside backbone can also be considered to be oligonucleosides. In some embodiments, a modified antisense polynucleotide agent will have a phosphorus atom in its internucleoside backbone.

[0127] Modified nucleotide backbones include, for example, phosphorothioates, chiral phosphorothioates, phosphorodithioates, phosphotriesters, aminoalkylphosphotriesters, methyl and other alkyl phosphonates including 3′-alkylene phosphonates and chiral phosphonates, phosphinates, phosphoramidates including 3′-amino phosphoramidate and aminoalkylphosphoramidates, thionophosphoramidates, thionoalkylphosphonates, thionoalkylphosphotriesters, and boranophosphates having normal 3′-5′ linkages, 2′-5′-linked analogs of these, and those having inverted polarity wherein the adjacent pairs of nucleoside units are linked 3′-5′ to 5′-3′ or 2′-5′ to 5′-2′. Various salts, mixed salts and free acid forms are also included.

[0128] Representative U.S. patents that teach the preparation of the above phosphorus-containing linkages include, but are not limited to, U.S. Pat. Nos. 3,687,808; 4,469,863; 4,476,301; 5,023,243; 5,177,195; 5,188,897; 5,264,423; 5,276,019; 5,278,302; 5,286,717; 5,321,131; 5,399,676; 5,405,939; 5,453,496; 5,455,233; 5,466,677; 5,476,925; 5,519,126; 5,536,821; 5,541,316; 5,550,111; 5,563,253; 5,571,799; 5,587,361; 5,625,050; 6,028,188; 6,124,445; 6,160,109; 6,169,170; 6,172,209; 6,239,265; 6,277,603; 6,326,199; 6,346,614; 6,444,423; 6,531,590; 6,534,639; 6,608,035; 6,683,167; 6,858,715; 6,867,294; 6,878,805; 7,015,315; 7,041,816; 7,273,933; 7,321,029; and U.S. Pat. RE39464, the entire contents of each of which are hereby incorporated herein by reference.

[0129] Modified nucleotide backbones that do not include a phosphorus atom therein have backbones that are formed by short chain alkyl or cycloalkyl internucleoside linkages, mixed heteroatoms and alkyl or cycloalkyl internucleoside linkages, or one or more short chain heteroatomic or heterocyclic internucleoside linkages. These include those having morpholino linkages (formed in part from the sugar portion of a nucleoside); siloxane backbones; sulfide, sulfoxide and sulfone backbones; formacetyl and thioformacetyl backbones; methylene formacetyl and thioformacetyl backbones; alkene containing backbones; sulfamate backbones; methyleneimino and methylenehydrazino backbones; sulfonate and sulfonamide backbones; amide backbones; and others having mixed N, O, S and CH₂ component parts.

[0130] Representative U.S. patents that teach the preparation of the above oligonucleosides include, but are not limited to, U.S. Pat. Nos. 5,034,506; 5,166,315; 5,185,444; 5,214,134; 5,216,141; 5,235,033; 5,64,562; 5,264,564; 5,405,938; 5,434,257; 5,466,677; 5,470,967; 5,489,677; 5,541,307; 5,561,225; 5,596,086; 5,602,240; 5,608,046; 5,610,289; 5,618,704; 5,623,070; 5,663,312; 5,633,360; 5,677,437; and, 5,677,439, the entire contents of each of which are hereby incorporated herein by reference.

[0131] In other embodiments, suitable nucleotide mimetics are contemplated for use in antisense polynucleotide agents, in which both the sugar and the internucleoside linkage, i.e., the backbone, of the nucleotide units are replaced with novel groups. The base units are maintained for hybridization with an appropriate nucleic acid target compound. One such oligomeric compound, an RNA mimetic that has been shown to have excellent hybridization properties, is referred to as a peptide nucleic acid (PNA). In PNA compounds, the sugar backbone of an RNA is replaced with an amide containing backbone, in particular an aminoethylglycine backbone. The nucleobases are retained and are bound directly or indirectly to aza nitrogen atoms of the amide portion of the backbone. Representative U.S. patents that teach the preparation of PNA compounds include, but are not limited to, U.S. Pat. Nos. 5,539,082; 5,714,331; and 5,719,262, the entire contents of each of which are hereby incorporated herein by reference. Additional PNA compounds suitable for use in the antisense polynucleotide agents of the invention are described in, for example, in Nielsen et al., Science, 1991, 254, 1497-1500.

[0132] Some embodiments featured in the invention include polynucleotides with phosphorothioate backbones and oligonucleosides with heteroatom backbones, and in particular —CH₂—NH—CH₂—, —CH₂—N(CH₃)—O—CH₂—4known as a methylene (methylimino) or MMI backbone], —CH₂—O—N(CH₃)—CH₂—, —CH₂—N(CH₃)—N(CH₃)—CH₂—and —N(CH₃)—CH₂—CH₂—[wherein the native phosphodiester backbone is represented as —O—P—O—CH₂—] of the above-referenced U.S. Pat. No. 5,489,677, and the amide backbones of the above-referenced U.S. Pat. No. 5,602,240. In some embodiments, the antisense polynucleotide agents featured herein have morpholino backbone structures of the above-referenced U.S. Pat. No. 5,034,506.

[0133] Modified nucleotides can also contain one or more modified or substituted sugar moieties. The antisense polynucleotide agents featured herein can include one of the following at the 2′-position: OH; F; O—, S—, or N-alkyl; O—, S—, or N-alkenyl; O—, S— or N-alkynyl; or O-alkyl-O-alkyl, wherein the alkyl, alkenyl and alkynyl can be substituted or unsubstituted C₁ to C₁₀ alkyl or C₂ to C₁₀ alkenyl and alkynyl. Exemplary suitable modifications include O[(CH₂)ₙO]ₘCH₃, O(CH₂)₋ₙOCH₃, O(CH₂)ₙNH₂, O(CH₂) ₙCH₃, O(CH₂)ₙONH₂, and O(CH₂)ₙONRCH₂)ₙCH₃)]₂, where n and m are from 1 to 10.

[0134] In other embodiments, antisense polynucleotide agents include one of the following at the 2′ position: C₁ to C₁₀ lower alkyl, substituted lower alkyl, alkaryl, aralkyl, O-alkaryl or O-aralkyl, SH, SCH₃, OCN, Cl, Br, CN, CF₃, OCF₃, SOCH₃, SO₂CH₃, ONO₂, NO₂, N₃, NH₂, heterocycloalkyl, heterocycloalkaryl, aminoalkylamino, polyalkylamino, substituted silyl, an RNA cleaving group, a reporter group, an intercalator, a group for improving the pharmacokinetic properties of an antisense polynucleotide, or a group for improving the pharmacodynamic properties of an antisense polynucleotide agent, and other substituents having similar properties. In some embodiments, the modification includes a 2′-methoxyethoxy (2′-O—CH₂CH₂OCH₃, also known as 2′-O-(2-methoxyethyl) or 2′-MOE) (Martin et al., Helv. Chico. Acta, 1995, 78:486-504) i.e., an alkoxy-alkoxy group. Another exemplary modification is 2′-dimethylaminooxyethoxy, i.e., a O(CH₂)₂ON(CH₃)₂ group, also known as 2′-DMAOE, as described in examples herein below, and 2′-dimethylaminoethoxyethoxy (also known in the art as 2′-O-dimethylaminoethoxyethyl or 2′-DMAEOE), i.e., 2′-O—CH₂—O—CH₂—N(CH₂)₂.

[0135] Other modifications include 2′-methoxy (2′-OCH₃), 2′-aminopropoxy (2′-OCH₂CH₂CH₂NH₂) and 2′-fluoro (2′-F). Similar modifications can also be made at other positions on a nucleotide of an antisense polynucleotide agent, particularly the 3′ position of the sugar on the 3′ terminal nucleotide. Antisense polynucleotide agents can also have sugar mimetics such as cyclobutyl moieties in place of the pentofuranosyl sugar. Representative U.S. patents that teach the preparation of such modified sugar structures include, but are not limited to, U.S. Pat. Nos. 4,981,957; 5,118,800; 5,319,080; 5,359,044; 5,393,878; 5,446,137; 5,466,786; 5,514,785; 5,519,134; 5,567,811; 5,576,427; 5,591,722; 5,597,909; 5,610,300; 5,627,053; 5,639,873; 5,646,265; 5,658,873; 5,670,633; and 5,700,920, certain of which are commonly owned with the instant application. The entire contents of each of the foregoing are hereby incorporated herein by reference.

[0136] Additional nucleotides having modified or substituted sugar moieties for use in the polynucleotide agents of the invention include nucleotides comprising a bicyclic sugar. A “bicyclic sugar” is a furanosyl ring modified by the bridging of two atoms. A“bicyclic nucleoside” (“BNA”) is a nucleoside having a sugar moiety comprising a bridge connecting two carbon atoms of the sugar ring, thereby forming a bicyclic ring system. In certain embodiments, the bridge connects the 4′-carbon and the 2′-carbon of the sugar ring. Thus, in some embodiments an antisense polynucleotide agent may include one or more locked nucleic acids. A “locked nucleic acid” (“LNA”) is a nucleotide having a modified ribose moiety in which the ribose moiety comprises an extra bridge connecting the 2′ and 4′ carbons. In other words, an LNA is a nucleotide comprising a bicyclic sugar moiety comprising a 4′—CH₂—O-2′ bridge. This structure effectively “locks” the ribose in the 3′-endo structural conformation. The addition of locked nucleic acids to santisense polynucleotide agents has been shown to increase santisense polynucleotide agent stability in serum, and to reduce off-target effects (Elmen, J. et al., (2005) Nucleic Acids Research 33(1):439-447; Mook, O R. et al., (2007) Mol Canc Ther 6(3):833-843; Grunweller, A. et al., (2003) Nucleic Acids Research 31(12):3185-3193).

[0137] Examples of bicyclic nucleosides for use in the polynucleotides of the invention include without limitation nucleosides comprising a bridge between the 4′ and the 2′ ribosyl ring atoms. In certain embodiments, the antisense polynucleotide agents of the invention include one or more bicyclic nucleosides comprising a 4′ to 2′ bridge. Examples of such 4′ to 2′ bridged bicyclic nucleosides, include but are not limited to 4′-(CH₂)—O-2′ (LNA); 4′-(CH₂)—S—2; 4′-(CH₂)₂—O-2′ (ENA); 4′-CH(CH₃)—O-2′ (also referred to as “constrained ethyl” or “cEt”) and 4′-CH(CH₂OCH₃)—O-2′ (and analogs thereof; see, e.g., U.S. Pat. No. 7,399,845); 4′-C(CH₃)(CH₃)—O-2′ (and analogs thereof; see e.g., U.S. Pat. No. 8,278,283); 4′-CH₂—N(OCH₃)-2′ (and analogs thereof; see e.g., U.S. Pat. No. 8,278,425); 4′-CH₂-0—N(CH₃)-2′ (see, e.g., U. S. Patent Publication No. 2004/0171570); 4′-CH₂—N(R)—O-2′, wherein R is H, C₁-C₁₂ alkyl, or a protecting group (see, e.g., U.S. Pat. No. 7,427,672); 4′—CH₂—C(H)(CH₃)-2′ (see, e.g., Chattopadhyaya et al., J. Org. Chem., 2009, 74, 118-134); and 4′-CH₂—C(═CH₂)-2′ (and analogs thereof; see, e.g., U.S. Pat. No. 8,278,426). The entire contents of each of the foregoing are hereby incorporated herein by reference.

[0138] Additional representative U.S. Patents and US Patent Publications that teach the preparation of locked nucleic acid nucleotides include, but are not limited to, the following: U.S. Pat. Nos. 6,268,490; 6,525,191; 6,670,461; 6,770,748; 6,794,499; 6,998,484; 7,053,207; 7,034,133;7,084,125; 7,399,845; 7,427,672; 7,569,686; 7,741,457; 8,022,193; 8,030,467; 8,278,425; 8,278,426; 8,278,283; US 2008/0039618; and US 2009/0012281, the entire contents of each of which are hereby incorporated herein by reference.

[0139] Any of the foregoing bicyclic nucleosides can be prepared having one or more stereochemical sugar configurations including for example α-L-ribofuranose and β-D-ribofuranose (see WO 99/14226).

[0140] In one particular embodiment of the invention, an antisense polynucleotide agent can include one or more constrained ethyl nucleotides. As used herein, a “constrained ethyl nucleotide” or “cEt” is a locked nucleic acid comprising a bicyclic sugar moiety comprising a 4′-CH(CH₃)—O-2′ bridge. In one embodiment, a constrained ethyl nucleotide is in an S conformation and is referred to as an “S-constrained ethyl nucleotide” or “S-cEt.”

[0141] Modified nucleotides included in the antisense polynucleotide agents of the invention can also contain one or more sugar mimetics. For example, the antisense polynucleotide agent may include a “modified tetrahydropyran nucleotide” or “modified THP nucleotide.” A “modified tetrahydropyran nucleotide” has a six-membered tetrahydropyran “sugar” substituted in for the pentofuranosyl residue in normal nucleotides (a sugar surrogate). Modified THP nucleotides include, but are not limited to, what is referred to in the art as hexitol nucleic acid (HNA), anitol nucleic acid (ANA), manitol nucleic acid (MNA) (see, e.g., Leumann, Bioorg. Med. Chem., 2002, 10, 841-854), or fluoro HNA (F-HNA).

[0142] In some embodiments of the invention, sugar surrogates comprise rings having more than 5 atoms and more than one heteroatom. For example nucleotides comprising morpholino sugar moieties and their use in oligomeric compounds has been reported (see for example: Braasch et al., Biochemistry, 2002, 41, 4503-4510; and U.S. Pat. Nos. 5,698,685; 5,166,315; 5,185,444; and 5,034,506). Morpholinos may be modified, for example by adding or altering various substituent groups from the above morpholino structure. Such sugar surrogates are referred to herein as “modified morpholinos.”

[0143] Combinations of modifications are also provided without limitation, such as 2′-F-5′-methyl substituted nucleosides (see PCT International Application WO 2008/101157 published on Aug. 21, 2008 for other disclosed 5′, 2′-bis substituted nucleosides) and replacement of the ribosyl ring oxygen atom with S and further substitution at the 2′-position (see published U.S. Patent Application US2005-0130923, published on Jun. 16, 2005) or alternatively 5′-substitution of a bicyclic nucleic acid (see PCT International Application WO 2007/134181, published on Nov. 22, 2007 wherein a 4′-CH₂—O-2′ bicyclic nucleoside is further substituted at the 5′ position with a 5′-methyl or a 5′-vinyl group). The synthesis and preparation of carbocyclic bicyclic nucleosides along with their oligomerization and biochemical studies have also been described (see, e.g., Srivastava et al., J. Am. Chem. Soc. 2007, 129(26), 8362-8379).

[0144] In certain embodiments, antisense compounds comprise one or more modified cyclohexenyl nucleosides, which is a nucleoside having a six-membered cyclohexenyl in place of the pentofuranosyl residue in naturally occurring nucleosides. Modified cyclohexenyl nucleosides include, but are not limited to those described in the art (see for example commonly owned, published PCT Application WO 2010/036696, published on Apr. 10, 2010, Robeyns et al., J. Am. Chem. Soc., 2008, 130(6), 1979-1984; Horvath et al., Tetrahedron Letters, 2007, 48, 3621-3623; Nauwelaerts et al., J. Am. Chem. Soc., 2007, 129(30), 9340-9348; Gu et al., Nucleosides, Nucleotides & Nucleic Acids, 2005, 24(5-7), 993-998; Nauwelaerts et al., Nucleic Acids Research, 2005, 33(8), 2452-2463; Robeyns et al., Acta Crystallographica, Section F: Structural Biology and Crystallization Communications, 2005, F61(6), 585-586; Gu et al., Tetrahedron, 2004, 60(9), 2111-2123; Gu et al., Oligonucleotides, 2003, 13(6), 479-489; Wang et al., J. Org. Chem., 2003, 68, 4499-4505; Verbeure et al., Nucleic Acids Research, 2001, 29(24), 4941-4947; Wang et al., J. Org. Chem., 2001, 66, 8478-82; Wang et al., Nucleosides, Nucleotides & Nucleic Acids, 2001, 20(4-7), 785-788; Wang et al., J. Am. Chem., 2000, 122, 8595-8602; Published PCT application, WO 06/047842; and Published PCT Application WO 01/049687; the text of each is incorporated by reference herein, in their entirety).

[0145] An antisense polynucleotide agent can also include nucleobase modifications or substitutions. As used herein, “unmodified” or “natural” nucleobases include the purine bases adenine (A) and guanine (G), and the pyrimidine bases thymine (T), cytosine (C) and uracil (U). Modified nucleobases include other synthetic and natural nucleobases such as deoxy-thymine (dT), 5-methylcytosine (5-me-C), 5-hydroxymethyl cytosine, xanthine, hypoxanthine, 2-aminoadenine, 6-methyl and other alkyl derivatives of adenine and guanine, 2-propyl and other alkyl derivatives of adenine and guanine, 2-thiouracil, 2-thiothymine and 2-thiocytosine, 5-halouracil and cytosine, 5-propynyl uracil and cytosine, 6-azo uracil, cytosine and thymine, 5-uracil (pseudouracil), 4-thiouracil, 8-halo, 8-amino, 8-thiol, 8-thioalkyl, 8-hydroxyl anal other 8-substituted adenines and guanines, 5-halo, particularly 5-bromo, 5-trifluoromethyl and other 5-substituted uracils and cytosines, 7-methylguanine and 7-methyladenine, 8-azaguanine and 8-azaadenine, 7-deazaguanine and 7-daazaadenine and 3-deazaguanine and 3-deazaadenine. Further nucleobases include those disclosed in U.S. Pat. No. 3,687,808, those disclosed in “Modified Nucleosides in Biochemistry,” Biotechnology and Medicine, Herdewijn, P. ed. Wiley-VCH, 2008; those disclosed in The Concise Encyclopedia Of Polymer Science And Engineering, pages 858-859, Kroschwitz, J. L, ed. John Wiley & Sons, 1990, these disclosed by Englisch et al., Angewandte Chemie, International Edition, 1991, 30, 613, and those disclosed by Sanghvi, Y S., Chapter 15, antisense polynucleotide agent Research and Applications, pages 289-302, Crooke, S. T. and Lebleu, B., Ed., CRC Press, 1993. Certain of these nucleobases are particularly useful for increasing the binding affinity of the agents featured in the invention. These include 5-substituted pyrimidines, 6-azapyrimidines and N-2, N-6 and 0-6 substituted purines, including 2-aminopropyladenine, 5-propynyluracil and 5-propynylcytosine. 5-methylcytosine substitutions have been shown to increase nucleic acid duplex stability by 0.6-1.2° C. (Sanghvi, Y. S., Crooke, S. T. and Lebleu, B., Eds., antisense polynucleotide agent Research and Applications, CRC Press, Boca Raton, 1993, pp. 276-278) and are exemplary base substitutions, even more particularly when combined with 2′-O-methoxyethyl sugar modifications.

[0146] Representative U.S. patents that teach the preparation of certain of the above noted modified nucleobases as well as other modified nucleobases include, but are not limited to, the above noted U.S. Pat. Nos. 3,687,808, 4,845,205; 5,130,30; 5,134,066; 5,175,273; 5,367,066; 5,432,272; 5,457,187; 5,459,255; 5,484,908; 5,502,177; 5,525,711; 5,552,540; 5,587,469; 5,594,121, 5,596,091; 5,614,617; 5,681,941; 5,750,692; 6,015,886; 6,147,200; 6,166,197; 6,222,025; 6,235,887; 6,380,368; 6,528,640; 6,639,062; 6,617,438; 7,045,610; 7,427,672; and 7,495,088, the entire contents of each of which are hereby incorporated herein by reference.

[0147] One or more of the nucleotides of agent of the invention may also include a hydroxymethyl substituted nucleotide. A “hydroxymethyl substituted nucleotide” is an acyclic 2′-3′-seco-nucleotide, also referred to as an “unlocked nucleic acid” (“UNA”) modification. Representative U.S. publications that teach the preparation of UNA include, but are not limited to, U.S. Pat. No. 8,314,227; and US Patent Publication Nos. 2013/0096289; 2013/0011922; and 2011/0313020, the entire contents of each of which are hereby incorporated herein by reference.

[0148] Additional modification which may potentially stabilize the ends of antisense polynucleotide agents can include N-(acetylaminocaproyl)-4-hydroxyprolinol (Hyp-C6-NHAc), N-(caproyl-4-hydroxyprolinol (Hyp-C6), N-(acetyl-4-hydroxyprolinol (Hyp-NHAc), thymidine-2′-O-deoxythymidine (ether), N-(aminocaproyl)-4-hydroxyprolinol (Hyp-C6-amino), 2-docosanoyl-uridine-3″-phosphate, inverted base dT(idT) and others. Disclosure of this modification can be found in US20120142101.

[0149] Any of the antisense polynucleotide agents of the invention may be optionally conjugated with a GalNAc derivative ligand, as described below.

[0150] As described in more detail below, an agent that contains conjugations of one or more carbohydrate moieties to an antisense polynucleotide agent can optimize one or more properties of the agent. In many cases, the carbohydrate moiety will be attached to a modified subunit of the antisense polynucleotide agent. For example, the ribose sugar of one or more ribonucleotide subunits of an agent can be replaced with another moiety, e.g., a non-carbohydrate (preferably cyclic) carrier to which is attached a carbohydrate ligand. A ribonucleotide subunit in which the ribose sugar of the subunit has been so replaced is referred to herein as a ribose replacement modification subunit (RRMS). A cyclic carrier may be a carbocyclic ring system, i.e., all ring atoms are carbon atoms, or a heterocyclic ring system, i.e., one or more ring atoms may be a heteroatom, e.g., nitrogen, oxygen, sulfur. The cyclic carrier may be a monocyclic ring system, or may contain two or more rings, e.g. fused rings. The cyclic carrier may be a fully saturated ring system, or it may contain one or more double bonds.

[0151] The ligand may be attached to the polynucleotide via a carrier. The carriers include (i) at least one “backbone attachment point,” preferably two “backbone attachment points” and (ii) at least one “tethering attachment point.” A “backbone attachment point” as used herein refers to a functional group, e.g. a hydroxyl group, or generally, a bond available for, and that is suitable for incorporation of the carrier into the backbone, e.g., the phosphate, or modified phosphate, e.g., sulfur containing, backbone, of a ribonucleic acid. A “tethering attachment point” (TAP) in some embodiments refers to a constituent ring atom of the cyclic carrier, e.g., a carbon atom or a heteroatom (distinct from an atom which provides a backbone attachment point), that connects a selected moiety. The moiety can be, e.g., a carbohydrate, e.g. monosaccharide, disaccharide, trisaccharide, tetrasaccharide, oligosaccharide and polysaccharide. Optionally, the selected moiety is connected by an intervening tether to the cyclic carrier. Thus, the cyclic carrier will often include a functional group, e.g., an amino group, or generally, provide a bond, that is suitable for incorporation or tethering of another chemical entity, e.g., a ligand to the constituent ring.

[0152] The antisense polynucleotide agents may be conjugated to a ligand via a carrier, wherein the carrier can be cyclic group or acyclic group; preferably, the cyclic group is selected from pyrrolidinyl, pyrazolinyl, pyrazolidinyl, imidazolinyl, imidazolidinyl, piperidinyl, piperazinyl, [1,3]dioxolane, oxazolidinyl, isoxazolidinyl, morpholinyl, thiazolidinyl, isothiazolidinyl, quinoxalinyl, pyridazinonyl, tetrahydrofuryl and and decalin; preferably, the acyclic group is selected from serinol backbone or diethanolamine backbone.

[0153] In certain specific embodiments, the antisense polynucleotide agent for use in the methods of the invention is an agent selected from the group of agents listed in Table 3. These agents may further comprise a ligand, as described below.

[0154] A. Antisense Polynucleotide Agents Comprising Motifs

[0155] In certain embodiments of the invention, at least one of the contiguous nucleotides of the anti sense polynucleotide agents of the invention may be a modified nucleotide. In one embodiment, the modified nucleotide comprises one or more modified sugars. In other embodiments, the modified nucleotide comprises one or more modified nucleobases. In yet other embodiments, the modified nucleotide comprises one or more modified internucleoside linkages. In some embodiments, the modifications (sugar modifications, nucleobase modifications, or linkage modifications) define a pattern or motif. In one embodiment, the patterns of modifications of sugar moieties, internucleoside linkages, and nucleobases are each independent of one another.

[0156] Antisense polynucleotide agents having modified oligonucleotides arranged in patterns, or motifs may, for example, confer to the agents properties such as enhanced inhibitory activity, increased binding affinity for a target nucleic acid, or resistance to degradation by in vivo nucleases. For example, such agents may contain at least one region modified so as to confer increased resistance to nuclease degradation, increased cellular uptake, increased binding affinity for the target nucleic acid, or increased inhibitory activity. A second region of such agents may optionally serve as a substrate for the cellular endonuclease RNase H, which cleaves the RNA strand of an RNA:DNA duplex.

[0157] An exemplary antisense polynucleotide agent having modified oligonucleotides arranged in patterns, or motifs is a gapmer. In a “gapmer”, an internal region or “gap” having a plurality of linked nucleotides that supports RNaseH cleavage is positioned between two external flanking regions or “wings” having a plurality of linked nucleotides that are chemically distinct from the linked nucleotides of the internal region. The gap segment generally serves as the substrate for endonuclease cleavage, while the wing segments comprise modified nucleotides.

[0158] The three regions of a gapmer motif (the 5 ‘-wing, the gap, and the 3’-wing) form a contiguous sequence of nucleotides and may be described as “X-Y-Z”, wherein “X” represents the length of the 5-wing, “Y” represents the length of the gap, and “Z” represents the length of the 3′-wing. In one embodiment, a gapmer described as “X-Y-Z” has a configuration such that the gap segment is positioned immediately adjacent to each of the 5′ wing segment and the 3′ wing segment. Thus, no intervening nucleotides exist between the 5′ wing segment and gap segment, or the gap segment and the 3′ wing segment. Any of the antisense compounds described herein can have a gapmer motif. In some embodiments, X and Z are the same, in other embodiments they are different.

[0159] In certain embodiments, the regions of a gapmer are differentiated by the types of modified nucleotides in the region. The types of modified nucleotides that may be used to differentiate the regions of a gapmer, in some embodiments, include β-D-ribonucleotides, (3-D-deoxyribonucleotides, 2′-modified nucleotides, e.g., 2′-modified nucleotides (e.g., 2′-MOE, and 2′-O—CH₃), and bicyclic sugar modified nucleotides (e.g., those having a 4′-(CH₂)n-O-2′ bridge, where n=1 or n=2).

[0160] In one embodiment, at least some of the modified nucleotides of each of the wings may differ from at least some of the modified nucleotides of the gap. For example, at least some of the modified nucleotides of each wing that are closest to the gap (the 3 ‘-most nucleotide of the 5’-wing and the 5′-most nucleotide of the 3 -wing) differ from the modified nucleotides of the neighboring gap nucleotides, thus defining the boundary between the wings and the gap. In certain embodiments, the modified nucleotides within the gap are the same as one another. In certain embodiments, the gap includes one or more modified nucleotides that differ from the modified nucleotides of one or more other nucleotides of the gap.

[0161] The length of the 5′-wing (X) of a gapmer may be 1 to 6 nucleotides in length, e.g., 2 to 6, 2 to 5, 3 to 6, 3 to 5, 1 to 5, 1 to 4, 1 to 3, 2 to 4 nucleotides in length, e.g., 1, 2, 3, 4, 5, or 6 nucleotides in length.

[0162] The length of the 3′-wing (Z) of a gapmer may be 1 to 6 nucleotides in length, e.g., 2 to 6, 2-5, 3 to 6, 3 to 5, 1 to 5, 1 to 4, 1 to 3, 2 to 4 nucleotides in length, e.g., 1, 2, 3, 4, 5, or 6 nucleotides in length.

[0163] The length of the gap (Y) of a gapmer may be 5 to 14 nucleotides in length, e.g., 5 to 13, 5 to 12, 5 to 11, 5 to 10, 5 to 9, 5 to 8, 5 to 7, 5 to 6, 6 to 14, 6 to 13, 6 to 12, 6 to 11, 6 to 10, 6 to 9, 6 to 8, 6 to 7, 7 to 14, 7 to 13, 7 to 12, 7 to 11, 7 to 10, 7 to 9, 7 to 8, 8 to 14, 8 to 13, 8 to 12, 8 to 11, 8 to 10, 8 to 9, 9 to 14, 9 to 13, 9 to 12, 9 to 11, 9 to 10, 10 to 14, 10 to 13, 10 to 12, 10 to 11, 11 to 14, 11 to 13, 11 to 12, 12 to 14, 12 to 13, or 13 to 14 nucleotides in length, e.g., 5, 6, 7, 8, 9, 10, 11, 12, 13, or 14 nucleotides in length.

[0164] In some embodiments of the invention X consists of 2, 3, 4, 5 or 6 nucleotides, Y consists of 7, 8, 9, 10, 11, or 12 nucleotides, and Z consists of 2, 3, 4, 5 or 6 nucleotides. Such gapmers include (X-Y-Z) 2-7-2, 2-7-3, 2-7-4, 2-7-5, 2-7-6, 3-7-2, 3-7-3, 3-7-4, 3-7-5, 3-7-6, 4-7-3, 4-7-4, 4-7-5, 4-7-6, 5-7-3, 5-7-4, 5-7-5, 5-7-6, 6-7-3, 6-7-4, 6-7-5, 6-7-6, 3-7-3, 3-7-4, 3-7-5, 3-7-6, 4-7-3, 4-7-4, 4-7-5, 4-7-6, 5-7-3, 5-7-4, 5-7-5, 5-7-6, 6-7-3, 6-7-4, 6-7-5, 6-7-6, 2-8-2, 2-8-3, 2-8-4, 2-8-5, 2-8-6, 3-8-2, 3-8-3, 3-8-4, 3-8-5, 3-8-6, 4-8-3, 4-8-4, 4-8-5, 4-8-6, 5-8-3, 5-8-4, 5-8-5, 5-8-6, 6-8-3, 6-8-4, 6-8-5, 6-8-6, 2-9-2, 2-9-3, 2-9-4, 2-9-5, 2-9-6, 3-9-2, 3-9-3, 3-9-4, 3-9-5, 3-9-6, 4-9-3, 4-9-4, 4-9-5, 4-9-6, 5-9-3, 5-9-4, 5-9-5, 5-9-6, 6-9-3, 6-9-4, 6-9-5, 6-9-6, 2-10-2, 2-10-3, 2-10-4, 2-10-5, 2-10-6, 3-10-2, 3-10-3, 3-10-4, 3-10-5, 3-10-6, 4-10-3, 4-10-4, 4-10-5, 4-10-6, 5-10-3, 5-10-4, 5-10-5, 5-10-6, 6-10-3, 6-10-4, 6-10-5, 6-10-6, 2-11-2, 2-11-3, 2-11-4, 2-11-5, 2-11-6, 3-11-2, 3-11-3, 3-11-4, 3-11-5, 3-11-6, 4-11-3, 4-11-4, 4-11-5, 4-11-6, 5-11-3, 5-11-4, 5-11-5, 5-11-6, 6-11-3, 6-11-4, 6-11-5, 6-11-6, 2- 12-2, 2-12-3, 2-12-4, 2-12-5, 2-12-6, 3-12-2, 3-12-3, 3-12-4, 3-12-5, 3-12-6, 4-12-3, 4-12-4, 4-12-5, 4-12-6, 5-12-3, 5-12-4, 5-12-5, 5-12-6, 6-12-3, 6-12-4, 6-12-5, or 6-12-6.

[0165] In some embodiments of the invention, antisense polynucleotide agents targeting PD-L1 include a 5-10-5 gapmer motif. In other embodiments of the invention, antisense polynucleotide agents targeting PD-L1 include a 4-10-4 gapmer motif. In another embodiment of the invention, antisense polynucleotide agents targeting PD-L1 include a 3-10-3 gapmer motif. In yet other embodiments of the invention, antisense polynucleotide agents targeting PD-L1 include a 2-10-2 gapmer motif.

[0166] The 5′-wing or 3′-wing of a gapmer may independently include 1-6 modified nucleotides, e.g., 1, 2, 3, 4, 5, or 6 modified nucleotides.

[0167] In some embodiment, the 5′-wing of a gapmer includes at least one modified nucleotide. In one embodiment, the 5′-wing of a gapmer comprises at least two modified nucleotides. In another embodiment, the 5′-wing of a gapmer comprises at least three modified nucleotides. In yet another embodiment, the 5′-wing of a gapmer comprises at least four modified nucleotides. In another embodiment, the 5′-wing of a gapmer comprises at least five modified nucleotides. In certain embodiments, each nucleotide of the 5′-wing of a gapmer is a modified nucleotide.

[0168] In some embodiments, the 3′-wing of a gapmer includes at least one modified nucleotide. In one embodiment, the 3′-wing of a gapmer comprises at least two modified nucleotides. In another embodiment, the 3′-wing of a gapmer comprises at least three modified nucleotides. In yet another embodiment, the 3′-wing of a gapmer comprises at least four modified nucleotides. In another embodiment, the 3′-wing of a gapmer comprises at least five modified nucleotides. In certain embodiments, each nucleotide of the 3′-wing of a gapmer is a modified nucleotide.

[0169] In certain embodiments, the regions of a gapmer are differentiated by the types of sugar moieties of the nucleotides. In one embodiment, the nucleotides of each distinct region comprise uniform sugar moieties. In other embodiments, the nucleotides of each distinct region comprise different sugar moieties. In certain embodiments, the sugar nucleotide modification motifs of the two wings are the same as one another. In certain embodiments, the sugar nucleotide modification motifs of the 5′-wing differs from the sugar nucleotide modification motif of the 3′-wing.

[0170] The 5′-wing of a gapmer may include 1-6 modified nucleotides, e.g., 1, 2, 3, 4, 5, or 6 modified nucleotides.

[0171] In one embodiment, at least one modified nucleotide of the 5′-wing of a gapmer is a bicyclic nucleotide, such as a constrained ethyl nucleotide, or an LNA. In another embodiment, the 5′-wing of a gapmer includes 2, 3, 4, or 5 bicyclic nucleotides. In some embodiments, each nucleotide of the 5′-wing of a gapmer is a bicyclic nucleotide.

[0172] In one embodiment, the 5′-wing of a gapmer includes at least 1, 2, 3, 4, or 5 constrained ethyl nucleotides. In some embodiments, each nucleotide of the 5′-wing of a gapmer is a constrained ethyl nucleotide.

[0173] In one embodiment, the 5′-wing of a gapmer comprises at least one LNA nucleotide. In another embodiment, the 5′-wing of a gapmer includes 2, 3, 4, or 5 LNA nucleotides. In other embodiments, each nucleotide of the 5′-wing of a gapmer is an LNA nucleotide.

[0174] In certain embodiments, at least one modified nucleotide of the 5′-wing of a gapmer is a non-bicyclic modified nucleotide, e.g., a 2 ‘-substituted nucleotide. A “2’-substituted nucleotide” is a nucleotide comprising a modification at the 2′-position which is other than H or OH, such as a 2′-OMe nucleotide, or a 2′-MOE nucleotide. In one embodiment, the 5′-wing of a gapmer comprises 2, 3, 4, or 5 2 ‘-substituted nucleotides. In one embodiment, each nucleotide of the 5’-wing of a gapmer is a 2 ‘-substituted nucleotide.

[0175] In one embodiment, the 5’-wing of a gapmer comprises at least one 2′-OMe nucleotide. In one embodiment, the 5′-wing of a gapmer comprises at least 2, 3, 4, or 5 2′-OMe nucleotides. In one embodiment, each of the nucleotides of the 5′-wing of a gapmer comprises a 2′-OMe nucleotide.

[0176] In one embodiment, the 5′-wing of a gapmer comprises at least one 2′-MOE nucleotide. In one embodiment, the 5′-wing of a gapmer comprises at least 2, 3, 4, or 5 2′-MOE nucleotides. In one embodiment, each of the nucleotides of the 5′-wing of a gapmer comprises a 2′-MOE nucleotide.

[0177] In certain embodiments, the 5′-wing of a gapmer comprises at least one 2′-deoxynucleotide. In certain embodiments, each nucleotide of the 5′-wing of a gapmer is a 2′-deoxynucleotide. In a certain embodiments, the 5′-wing of a gapmer comprises at least one ribonucleotide. In certain embodiments, each nucleotide of the 5′-wing of a gapmer is a ribonucleotide.

[0178] The 3′-wing of a gapmer may include 1-6 modified nucleotides, e.g., 1, 2, 3, 4, 5, or 6 modified nucleotides.

[0179] In one embodiment, at least one modified nucleotide of the 3′-wing of a gapmer is a bicyclic nucleotide, such as a constrained ethyl nucleotide, or an LNA. In another embodiment, the 3′-wing of a gapmer includes 2, 3, 4, or 5 bicyclic nucleotides. In some embodiments, each nucleotide of the 3′-wing of a gapmer is a bicyclic nucleotide.

[0180] In one embodiment, the 3′-wing of a gapmer includes at least one constrained ethyl nucleotide. In another embodiment, the 3′-wing of a gapmer includes 2, 3, 4, or 5 constrained ethyl nucleotides. In some embodiments, each nucleotide of the 3′-wing of a gapmer is a constrained ethyl nucleotide.

[0181] In one embodiment, the 3′-wing of a gapmer comprises at least one LNA nucleotide. In another embodiment, the 3′-wing of a gapmer includes 2, 3, 4, or 5 LNA nucleotides. In other embodiments, each nucleotide of the 3′-wing of a gapmer is an LNA nucleotide.

[0182] In certain embodiments, at least one modified nucleotide of the 3′-wing of a gapmer is a non-bicyclic modified nucleotide, e.g., a 2 ‘-substituted nucleotide. In one embodiment, the 3’-wing of a gapmer comprises 2, 3, 4, or 5 2 ‘-substituted nucleotides. In one embodiment, each nucleotide of the 3’-wing of a gapmer is a 2 ‘-substituted nucleotide.

[0183] In one embodiment, the 3’-wing of a gapmer comprises at least one 2′-OMe nucleotide. In one embodiment, the 3′-wing of a gapmer comprises at least 2, 3, 4, or 5 2′-OMe nucleotides. In one embodiment, each of the nucleotides of the 3′-wing of a gapmer comprises a 2′-OMe nucleotide.

[0184] In one embodiment, the 3′-wing of a gapmer comprises at least one 2′-MOE nucleotide. In one embodiment, the 3′-wing of a gapmer comprises at least 2, 3, 4, or 5 2′-MOE nucleotides. In one embodiment, each of the nucleotides of the 3′-wing of a gapmer comprises a 2′-MOE nucleotide.

[0185] In certain embodiments, the 3′-wing of a gapmer comprises at least one 2′-deoxynucleotide. In certain embodiments, each nucleotide of the 3′-wing of a gapmer is a 2′-deoxynucleotide. In a certain embodiments, the 3′-wing of a gapmer comprises at least one ribonucleotide. In certain embodiments, each nucleotide of the 3′-wing of a gapmer is a ribonucleotide.

[0186] The gap of a gapmer may include 5-14 modified nucleotides, e.g., 5, 6, 7, 8, 9, 10, 11, 12, 13, or 14 modified nucleotides.

[0187] In one embodiment, the gap of a gapmer comprises at least one 5-methylcytosine. In one embodiment, the gap of a gapmer comprises at least 2, 3, 4, 5, 6, 7, 8, 9, 10, 11, 12, or 13 5-methylcytosines. In one embodiment, all of the nucleotides of the the gap of a gapmer are 5-methylcytosines.

[0188] In one embodiment, the gap of a gapmer comprises at least one 2′-deoxynucleotide. In one embodiment, the gap of a gapmer comprises at least 2, 3, 4, 5, 6, 7, 8, 9, 10, 11, 12, or 13 2′-deoxynucleotides. In one embodiment, all of the nucleotides of the the gap of a gapmer are 2′-deoxynucleotides.

[0189] A gapmer may include one or more modified internucleotide linkages. In some embodiments, a gapmer includes one or more phosphodiester internucleotide linkages. In other embodiments, a gapmer includes one or more phosphorothioate internucleotide linkages.

[0190] In one embodiment, each nucleotide of a 5′-wing of a gapmer are linked via a phosphorothioate internucleotide linkage. In another embodiment, each nucleotide of a 3′-wing of a gapmer are linked via a phosphorothioate internucleotide linkage. In yet another embodiment, each nucleotide of a gap segment of a gapmer is linked via a phosphorothioate internucleotide linkage. In one embodiment, all of the nucleotides in a gapmer are linked via phosphorothioate internucleotide linkages.

[0191] In one embodiment, an antisense polynucleotide agent targeting a PD-L1 gene comprises a gap segment of ten 2′-deoxyribonucleotides positioned immediately adjacent to and between a 5′-wing segment comprising five nucleotides and a 3′-wing segment comprising 5 nucleotides.

[0192] In another embodiment, an antisense polynucleotide agent targeting a PD-L1 gene comprises a gap segment of ten 2′-deoxyribonucleotides positioned immediately adjacent to and between a 5′-wing segment comprising four nucleotides and a 3′-wing segment comprising four nucleotides.

[0193] In another embodiment, an antisense polynucleotide agent targeting a PD-L1 gene comprises a gap segment of ten 2′-deoxyribonucleotides positioned immediately adjacent to and between a 5′-wing segment comprising three nucleotides and a 3′-wing segment comprising three nucleotides.

[0194] In another embodiment, an antisense polynucleotide agent targeting a PD-L1 gene comprises a gap segment of ten 2′-deoxyribonucleotides positioned immediately adjacent to and between a 5′-wing segment comprising two nucleotides and a 3′-wing segment comprising two nucleotides.

[0195] In one embodiment, each nucleotide of a 5-wing flanking a gap segment of 10 2′-deoxyribonucleotides comprises a modified nucleotide. In another embodiment, each nucleotide of a 3-wing flanking a gap segment of 10 2′-deoxyribonucleotides comprises a modified nucleotide. In one embodiment, each of the modified 5′-wing nucleotides and each of the modified 3′-wing nucleotides comprise a 2′-sugar modification. In one embodiment, the 2′-sugar modification is a 2′-OMe modification. In another embodiment, the 2′-sugar modification is a 2′-MOE modification. In one embodiment, each of the modified 5′-wing nucleotides and each of the modified 3′-wing nucleotides comprise a bicyclic nucleotide. In one embodiment, the bicyclic nucleotide is a constrained ethyl nucleotide. In another embodiment, the bicyclic nucleotide is an LNA nucleotide. In one embodiment, each cytosine in an antisense polynucleotide agent targeting a PD-L1 gene is a 5-methylcytosine.

[0196] In one embodiment, an antisense polynucleotide agent targeting a PD-L1 gene comprises a gap segment of ten 2′-deoxyribonucleotides positioned immediately adjacent to and between a 5′-wing segment comprising five nucleotides comprising a 2′OMe modification and a 3′-wing segment comprising five nucleotides comprising a 2′OMe modification, wherein each internucleotde linkage of the agent is a phosphorothioate linkage. In one embodiment, each cytosine of the agent is a 5-methylcytosine. In some embodiments, the agent further comprises a ligand.

[0197] In one embodiment, an antisense polynucleotide agent targeting a PD-L1 gene comprises a gap segment of ten 2′-deoxyribonucleotides positioned immediately adjacent to and between a 5′-wing segment comprising five nucleotides comprising a 2′MOE modification and a 3′-wing segment comprising five nucleotides comprising a 2′MOE modification, wherein each internucleotide linkage of the agent is a phosphorothioate linkage. In one embodiment, each cytosine of the agent is a 5-methylcytosine. In some embodiments, the agent further comprises a ligand.

[0198] In one embodiment, an antisense polynucleotide agent targeting a PD-L1 gene comprises a gap segment of ten 2′-deoxyribonucleotides positioned immediately adjacent to and between a 5′-wing segment comprising five constrained ethyl nucleotides and a 3′-wing segment comprising five constrained ethyl nucleotides, wherein each internucleoitde linkage of the agent is a phosphorothioate linkage. In some embodiments, each cytosine of the agent is a 5-methylcytosine.

[0199] In one embodiment, an antisense polynucleotide agent targeting a PD-L1 gene comprises a gap segment of ten 2′-deoxyribonucleotides positioned immediately adjacent to and between a 5′-wing segment comprising five LNA nucleotides and a 3′-wing segment comprising five LNA nucleotides, wherein each internucleotide linkage of the agent is a phosphorothioate linkage. In some embodiments, each cytosine of the agent is a 5-methylcytosine.

[0200] In one embodiment, an antisense polynucleotide agent targeting a PD-L1 gene comprises a gap segment of ten 2′-deoxyribonucleotides positioned immediately adjacent to and between a 5′-wing segment comprising four nucleotides comprising a 2′OMe modification and a 3′-wing segment comprising four nucleotides comprising a 2′OMe modification, wherein each internucleotde linkage of the agent is a phosphorothioate linkage. In some embodiments, each cytosine of the agent is a 5-methylcytosine.

[0201] In one embodiment, an antisense polynucleotide agent targeting a PD-L1 gene comprises a gap segment of ten 2′-deoxyribonucleotides positioned immediately adjacent to and between a 5′-wing segment comprising four nucleotides comprising a 2′MOE modification and a 3′-wing segment comprising four nucleotides comprising a 2′MOE modification, wherein each internucleotide linkage of the agent is a phosphorothioate linkage. In some embodiments, each cytosine of the agent is a 5-methylcytosine.

[0202] In one embodiment, an antisense polynucleotide agent targeting a PD-L1 gene comprises a gap segment of ten 2′-deoxyribonucleotides positioned immediately adjacent to and between a 5′-wing segment comprising four constrained ethyl nucleotides and a 3′-wing segment comprising four constrained ethyl nucleotides, wherein each internucleoitde linkage of the agent is a phosphorothioate linkage. In some embodiments, each cytosine of the agent is a 5-methylcytosine.

[0203] In one embodiment, an antisense polynucleotide agent targeting a PD-L1 gene comprises a gap segment of ten 2′-deoxyribonucleotides positioned immediately adjacent to and between a 5′-wing segment comprising four LNA nucleotides and a 3′-wing segment comprising four LNA nucleotides, wherein each internucleotide linkage of the agent is a phosphorothioate linkage. In some embodiments, each cytosine of the agent is a 5-methylcytosine.

[0204] In one embodiment, an antisense polynucleotide agent targeting a PD-L1 gene comprises a gap segment of ten 2′-deoxyribonucleotides positioned immediately adjacent to and between a 5′-wing segment comprising three nucleotides comprising a 2′OMe modification and a 3′-wing segment comprising three nucleotides comprising a 2′OMe modification, wherein each internucleotde linkage of the agent is a phosphorothioate linkage. In some embodiments, each cytosine of the agent is a 5-methylcytosine.

[0205] In one embodiment, an antisense polynucleotide agent targeting a PD-L1 gene comprises a gap segment of ten 2′-deoxyribonucleotides positioned immediately adjacent to and between a 5′-wing segment comprising three nucleotides comprising a 2′MOE modification and a 3′-wing segment comprising three nucleotides comprising a 2′MOE modification, wherein each internucleotide linkage of the agent is a phosphorothioate linkage. In some embodiments, each cytosine of the agent is a 5-methylcytosine.

[0206] In one embodiment, an antisense polynucleotide agent targeting a PD-L1 gene comprises a gap segment of ten 2′-deoxyribonucleotides positioned immediately adjacent to and between a 5′-wing segment comprising three constrained ethyl nucleotides and a 3′-wing segment comprising three constrained ethyl nucleotides, wherein each internucleoitde linkage of the agent is a phosphorothioate linkage. In some embodiments, each cytosine of the agent is a 5-methylcytosine.

[0207] In one embodiment, an antisense polynucleotide agent targeting a PD-L1 gene comprises a gap segment of ten 2′-deoxyribonucleotides positioned immediately adjacent to and between a 5′-wing segment comprising three LNA nucleotides and a 3′-wing segment comprising three LNA nucleotides, wherein each internucleotide linkage of the agent is a phosphorothioate linkage. In some embodiments, each cytosine of the agent is a 5-methylcytosine.

[0208] In one embodiment, an antisense polynucleotide agent targeting a PD-L1 gene comprises a gap segment of ten 2′-deoxyribonucleotides positioned immediately adjacent to and between a 5′-wing segment comprising two nucleotides comprising a 2′OMe modification and a 3′-wing segment comprising two nucleotides comprising a 2′OMe modification, wherein each internucleotde linkage of the agent is a phosphorothioate linkage. In some embodiments, each cytosine of the agent is a 5-methylcytosine.

[0209] In one embodiment, an antisense polynucleotide agent targeting a PD-L1 gene comprises a gap segment of ten 2′-deoxyribonucleotides positioned immediately adjacent to and between a 5′-wing segment comprising two nucleotides comprising a 2′MOE modification and a 3′-wing segment comprising two nucleotides comprising a 2′MOE modification, wherein each internucleotide linkage of the agent is a phosphorothioate linkage. In some embodiments, each cytosine of the agent is a 5-methylcytosine.

[0210] In one embodiment, an antisense polynucleotide agent targeting a PD-L1 gene comprises a gap segment of ten 2′-deoxyribonucleotides positioned immediately adjacent to and between a 5′-wing segment comprising two constrained ethyl nucleotides and a 3′-wing segment comprising two constrained ethyl nucleotides, wherein each internucleoitde linkage of the agent is a phosphorothioate linkage. In some embodiments, each cytosine of the agent is a 5-methylcytosine.

[0211] In one embodiment, an antisense polynucleotide agent targeting a PD-L1 gene comprises a gap segment of ten 2′-deoxyribonucleotides positioned immediately adjacent to and between a 5′-wing segment comprising two LNA nucleotides and a 3′-wing segment comprising two LNA nucleotides, wherein each internucleotide linkage of the agent is a phosphorothioate linkage. In some embodiments, each cytosine of the agent is a 5-methylcytosine.

[0212] Further gapmer designs suitable for use in the agents, compositions, and methods of the invention are disclosed in, for example, U.S. Pat. Nos. 7,687,617 and 8,580,756; U.S. Patent Publication Nos. 20060128646, 20090209748, 20140128586, 20140128591, 20100210712, and 20080015162A1; and International Publication No. WO 2013/159108, the entire content of each of which are incorporated herein by reference.

### IV. Antisense Polynucleotide Agents Conjugated to Ligands

[0213] Another modification of the polynucleotide agents of the invention involves chemically linking to the agent one or more ligands, moieties, or conjugates that enhance the activity, cellular distribution, or cellular uptake of the antisense polynucleotide agent. Such moieties include but are not limited to lipid moieties such as a cholesterol moiety (Letsinger et al., Proc. Natl. Acid. Sci. USA, 1989, 86: 6553-6556), cholic acid (Manoharan et al., Biorg. Med. Chem. Let., 1994, 4:1053-1060), a thioether, e.g., beryl-S-tritylthiol (Manoharan et al., Ann. N.Y. Acad. Sci., 1992, 660:306-309; Manoharan et al., Biorg. Med. Chem. Let., 1993, 3:2765-2770), a thiocholesterol (Oberhauser et al., Nucl. Acids Res., 1992, 20:533-538), an aliphatic chain, e.g., dodecandiol or undecyl residues (Saison-Behmoaras et al., EMBO 1991, 10:1111-1118; Kabanov et al., FEBS Lett., 1990, 259:327-330; Svinarchuk et al., Biochimie, 1993, 75:49-54), a phospholipid, e.g., di-hexadecyl-rac-glycerol or triethylammonium 1,2-di-O-hexadecyl-rac-glycero-3-phosphonate (Manoharan et al., Tetrahedron Lett., 1995, 36:3651-3654; Shea et al., Nucl. Acids Res., 1990, 18:3777-3783), a polyamine or a polyethylene glycol chain (Manoharan et al., Nucleosides & Nucleotides, 1995, 14:969-973), or adamantane acetic acid (Manoharan et al., Tetrahedron Lett., 1995, 36:3651-3654), a palmityl moiety (Mishra et al., Biochim. Biophys. Acta, 1995, 1264:229-237), or an octadecylamine or hexylamino-carbonyloxycholesterol moiety (Crooke et al., J. Pharmacol. Exp. Ther., 1996, 277:923-937).

[0214] In one embodiment, a ligand alters the distribution, targeting, or lifetime of an antisense polynucleotide agent into which it is incorporated. In preferred embodiments a ligand provides an enhanced affinity for a selected target, e.g., molecule, cell, or cell type; compartment, e.g., a cellular or organ compartment, tissue, organ, or region of the body, as, e.g., compared to a species absent such a ligand. Preferred ligands will not take part in hybridization of an antisense polynucleotide agent to the targeted mRNA.

[0215] Ligands can include a naturally occurring substance, such as a protein (e.g., human serum albumin (HSA), low-density lipoprotein (LDL), or globulin); carbohydrate (e.g., a dextran, pullulan, chitin, chitosan, inulin, cyclodextrin, N-acetylgalactosamine, or hyaluronic acid); or a lipid. The ligand can also be a recombinant or synthetic molecule, such as a synthetic polymer, e.g., a synthetic polyamino acid. Examples of polyamino acids include polyamino acid is a polylysine (PLL), poly L-aspartic acid, poly L-glutamic acid, styrene-maleic acid anhydride copolymer, poly(L-lactide-co-glycolied) copolymer, divinyl ether-maleic anhydride copolymer, N-(2-hydroxypropyl)methacrylamide copolymer (HMPA), polyethylene glycol (PEG), polyvinyl alcohol (PVA), polyurethane, poly(2-ethylacryllic acid), N-isopropylacrylamide polymers, or polyphosphazine. Example of polyamines include: polyethylenimine, polylysine (PLL), spermine, spermidine, polyamine, pseudopeptide-polyamine, peptidomimetic polyamine, dendrimer polyamine, arginine, amidine, protamine, cationic lipid, cationic porphyrin, quaternary salt of a polyamine, or an alpha helical peptide.

[0216] Ligands can also include targeting groups, e.g., a cell or tissue targeting agent, e.g., a lectin, glycoprotein, lipid, or protein, e.g., an antibody, that binds to a specified cell type such as a kidney cell. A targeting group can be a thyrotropin, melanotropin, lectin, glycoprotein, surfactant protein A, Mucin carbohydrate, multivalent lactose, multivalent galactose, N-acetyl-galactosamine, N-acetyl-gulucoseamine multivalent mannose, multivalent fucose, glycosylated polyaminoacids, multivalent galactose, transferrin, bisphosphonate, polyglutamate, polyaspartate, a lipid, cholesterol, a steroid, bile acid, folate, vitamin B12, vitamin A, biotin, or an RGD peptide or RGD peptide mimetic.

[0217] Other examples of ligands include dyes, intercalating agents (e.g. acridines), cross-linkers (e.g. psoralene, mitomycin C), porphyrins (TPPC4, texaphyrin, Sapphyrin), polycyclic aromatic hydrocarbons (e.g., phenazine, dihydrophenazine), artificial endonucleases (e.g. EDTA), lipophilic molecules, e.g., cholesterol, cholic acid, adamantane acetic acid, 1-pyrene butyric acid, dihydrotestosterone, 1,3-Bis-O(hexadecyl)glycerol, geranyloxyhexyl group, hexadecylglycerol, borneol, menthol, 1,3-propanediol, heptadecyl group, palmitic acid, myristic acid,O3-(oleoyl)lithocholic acid, 03-(oleoyl)cholenic acid, dimethoxytrityl, or phenoxazine)and peptide conjugates (e.g., antennapedia peptide, Tat peptide), alkylating agents, phosphate, amino, mercapto, PEG (e.g., PEG-40K), 1VIPEG, [MPEG]2, polyamino, alkyl, substituted alkyl, radiolabeled markers, enzymes, haptens (e.g. biotin), transport/absorption facilitators (e.g., aspirin, vitamin E, folic acid), synthetic ribonucleases (e.g., imidazole, bisimidazole, histamine, imidazole clusters, acridine-imidazole conjugates, Eu3+ complexes of tetraazamacrocycles), dinitrophenyl, HRP, or AP.

[0218] Ligands can be proteins, e.g., glycoproteins, or peptides, e.g., molecules having a specific affinity for a co-ligand, or antibodies e.g., an antibody, that binds to a specified cell type such as a hepatic cell. Ligands can also include hormones and hormone receptors. They can also include non-peptidic species, such as lipids, lectins, carbohydrates, vitamins, cofactors, multivalent lactose, multivalent galactose, N-acetyl-galactosamine, N-acetyl-gulucosamine multivalent mannose, or multivalent fucose. The ligand can be, for example, a lipopolysaccharide, an activator of p38 MAP kinase, or an activator of NF-KB.

[0219] The ligand can be a substance, e.g., a drug, which can increase the uptake of the antisense polynucleotide agent into the cell, for example, by disrupting the cell's cytoskeleton, e.g., by disrupting the cell's microtubules, microfilaments, or intermediate filaments. The drug can be, for example, taxon, vincristine, vinblastine, cytochalasin, nocodazole, japlakinolide, latrunculin A, phalloidin, swinholide A, indanocine, or myoservin.

[0220] In some embodiments, a ligand attached to an antisense polynucleotide agent as described herein acts as a pharmacokinetic modulator (PK modulator). PK modulators include lipophiles, bile acids, steroids, phospholipid analogues, peptides, protein binding agents, PEG, vitamins etc. Exemplary PK modulators include, but are not limited to, cholesterol, fatty acids, cholic acid, lithocholic acid, dialkylglycerides, diacylglyceride, phospholipids, sphingolipids, naproxen, ibuprofen, vitamin E, biotin etc. Oligonucleotides that comprise a number of phosphorothioate linkages are also known to bind to serum protein, thus short oligonucleotides, e.g., oligonucleotides of 5 bases, 10 bases, 15 bases or 20 bases, comprising multiple of phosphorothioate linkages in the backbone are also amenable to the present invention as ligands (e.g. as PK modulating ligands). In addition, aptamers that bind serum components (e.g. serum proteins) are also suitable for use as PK modulating ligands in the embodiments described herein.

[0221] Ligand-conjugated polynucleotides of the invention may be synthesized by the use of a polynucleotide that bears a pendant reactive functionality, such as that derived from the attachment of a linking molecule onto the oligonucleotide (described below). This reactive polynucleotide may be reacted directly with commercially-available ligands, ligands that are synthesized bearing any of a variety of protecting groups, or ligands that have a linking moiety attached thereto.

[0222] The polynucleotides used in the conjugates of the present invention may be conveniently and routinely made through the well-known technique of solid-phase synthesis. Equipment for such synthesis is sold by several vendors including, for example, Applied Biosystems (Foster City, Calif). Any other means for such synthesis known in the art may additionally or alternatively be employed. It is also known to use similar techniques to prepare other polynucleotides, such as the phosphorothioates and alkylated derivatives.

[0223] In the ligand-conjugated polynucleotides and ligand-molecule bearing sequence-specific linked nucleosides of the present invention, the polynucleotides and polynucleosides may be assembled on a suitable DNA synthesizer utilizing standard nucleotide or nucleoside precursors, or nucleotide or nucleoside conjugate precursors that already bear the linking moiety, ligand-nucleotide or nucleoside-conjugate precursors that already bear the ligand molecule, or non-nucleoside ligand-bearing building blocks.

[0224] When using nucleotide-conjugate precursors that already bear a linking moiety, the synthesis of the sequence-specific linked nucleosides is typically completed, and the ligand molecule is then reacted with the linking moiety to form the ligand-conjugated oligonucleotide. In some embodiments, the polynucleotides or linked nucleosides of the present invention are synthesized by an automated synthesizer using phosphoramidites derived from ligand-nucleoside conjugates in addition to the standard phosphoramidites and non-standard phosphoramidites that are commercially available and routinely used in oligonucleotide synthesis.

[0225] A. Lipid Conjugates

[0226] In one embodiment, the ligand or conjugate is a lipid or lipid-based molecule. Such a lipid or lipid-based molecule preferably binds a serum protein, e.g., human serum albumin (HSA). An HSA binding ligand allows for distribution of the conjugate to a target tissue, e.g., a non-kidney target tissue of the body. For example, the target tissue can be the liver, including parenchymal cells of the liver. Other molecules that can bind HSA can also be used as ligands. For example, naproxen or aspirin can be used. A lipid or lipid-based ligand can (a) increase resistance to degradation of the conjugate, (b) increase targeting or transport into a target cell or cell membrane, or (c) can be used to adjust binding to a serum protein, e.g., HSA.

[0227] A lipid based ligand can be used to inhibit, e.g., control the binding of the conjugate to a target tissue. For example, a lipid or lipid-based ligand that binds to HSA more strongly will be less likely to be targeted to the kidney and therefore less likely to be cleared from the body. A lipid or lipid-based ligand that binds to HSA less strongly can be used to target the conjugate to the kidney.

[0228] In a preferred embodiment, the lipid based ligand binds HSA. Preferably, it binds HSA with a sufficient affinity such that the conjugate will be preferably distributed to a non-kidney tissue. However, it is preferred that the affinity not be so strong that the HSA-ligand binding cannot be reversed.

[0229] In another preferred embodiment, the lipid based ligand binds HSA weakly or not at all, such that the conjugate will be preferably distributed to the kidney. Other moieties that target to kidney cells can also be used in place of or in addition to the lipid based ligand.

[0230] In another aspect, the ligand is a moiety, e.g., a vitamin, which is taken up by a target cell, e.g., a proliferating cell. These are particularly useful for treating disorders characterized by unwanted cell proliferation, e.g., of the malignant or non-malignant type, e.g., cancer cells. Exemplary vitamins include vitamin A, E, and K. Other exemplary vitamins include are B vitamin, e.g., folic acid, B12, riboflavin, biotin, pyridoxal or other vitamins or nutrients taken up by target cells such as liver cells. Also included are HSA and low density lipoprotein (LDL).

[0231] B. Cell Permeation Agents

[0232] In another aspect, the ligand is a cell-permeation agent, preferably a helical cell-permeation agent. Preferably, the agent is amphipathic. An exemplary agent is a peptide such as tat or antennopedia. If the agent is a peptide, it can be modified, including a peptidylmimetic, invertomers, non-peptide or pseudo-peptide linkages, and use of D-amino acids. The helical agent is preferably an alpha-helical agent, which preferably has a lipophilic and a lipophobic phase.

[0233] The ligand can be a peptide or peptidomimetic. A peptidomimetic (also referred to herein as an oligopeptidomimetic) is a molecule capable of folding into a defined three-dimensional structure similar to a natural peptide. The attachment of peptide and peptidomimetics to antisense polynucleotide agents can affect pharmacokinetic distribution of the agent, such as by enhancing cellular recognition and absorption. The peptide or peptidomimetic moiety can be 5-50 amino acids long, e.g., 5, 10, 15, 20, 25, 30, 35, 40, 45, or 50 amino acids long.

[0234] A peptide or peptidomimetic can be, for example, a cell permeation peptide, cationic peptide, amphipathic peptide, or hydrophobic peptide (e.g., consisting primarily of Tyr, Trp or Phe). The peptide moiety can be a dendrimer peptide, constrained peptide or crosslinked peptide. In another alternative, the peptide moiety can include a hydrophobic membrane translocation sequence (MTS). An exemplary hydrophobic MTS-containing peptide is RFGF having the amino acid sequence AAVALLPAVLLALLAP (SEQ ID NO: 9). An RFGF analogue (e.g., amino acid sequence AALLPVLLAAP (SEQ ID NO: 10) containing a hydrophobic MTS can also be a targeting moiety. The peptide moiety can be a “delivery” peptide, which can carry large polar molecules including peptides, oligonucleotides, and protein across cell membranes. For example, sequences from the HIV Tat protein (GRKKRRQRRRPPQ (SEQ ID NO: 11) and the Drosophila Antennapedia protein (RQIKIWFQNRRMKWKK (SEQ ID NO: 12) have been found to be capable of functioning as delivery peptides. A peptide or peptidomimetic can be encoded by a random sequence of DNA, such as a peptide identified from a phage-display library, or one-bead-one-compound (OBOC) combinatorial library (Lam et al., Nature, 354:82-84, 1991). Examples of a peptide or peptidomimetic tethered to an antisens epolynucleotide agent via an incorporated monomer unit for cell targeting purposes is an arginine-glycine-aspartic acid (RGD)-peptide, or RGD mimic. A peptide moiety can range in length from 5 amino acids to 40 amino acids. The peptide moieties can have a structural modification, such as to increase stability or direct conformational properties. Any of the structural modifications described below can be utilized.

[0235] An RGD peptide for use in the compositions and methods of the invention may be linear or cyclic, and may be modified, e.g., glycosylated or methylated, to facilitate targeting to a specific tissue(s). RGD-containing peptides and peptidiomimemtics may include D-amino acids, as well as synthetic RGD mimics. In addition to RGD, one can use other moieties that target the integrin ligand. Preferred conjugates of this ligand target PECAM-1 or VEGF.

[0236] A “cell permeation peptide” is capable of permeating a cell, e.g., a microbial cell, such as a bacterial or fungal cell, or a mammalian cell, such as a human cell. A microbial cell-permeating peptide can be, for example, an α-helical linear peptide (e.g., LL-37 or Ceropin P1), a disulfide bond-containing peptide (e.g., α-defensin, β-defensin or bactenecin), or a peptide containing only one or two dominating amino acids (e.g., PR-39 or indolicidin). A cell permeation peptide can also include a nuclear localization signal (NLS). For example, a cell permeation peptide can be a bipartite amphipathic peptide, such as MPG, which is derived from the fusion peptide domain of HIV-1 gp41 and the NLS of SV40 large T antigen (Simeoni et al., Nucl. Acids Res. 31:2717-2724, 2003).

[0237] C. Carbohydrate Conjugates

[0238] In some embodiments of the compositions and methods of the invention, an antisense polynucleotide agent further comprises a carbohydrate. The carbohydrate conjugated agents are advantageous for the in vivo delivery of nucleic acids, as well as compositions suitable for in vivo therapeutic use, as described herein (see, e.g., Prakash, et al. (2014) Nuc Acid Res doi 10.1093/nar/gku531). As used herein, “carbohydrate” refers to a compound which is either a carbohydrate per se made up of one or more monosaccharide units having at least 6 carbon atoms (which can be linear, branched or cyclic) with an oxygen, nitrogen or sulfur atom bonded to each carbon atom; or a compound having as a part thereof a carbohydrate moiety made up of one or more monosaccharide units each having at least six carbon atoms (which can be linear, branched or cyclic), with an oxygen, nitrogen or sulfur atom bonded to each carbon atom. Representative carbohydrates include the sugars (mono-, di-, tri- and oligosaccharides containing from 4, 5, 6, 7, 8, or 9 monosaccharide units), and polysaccharides such as starches, glycogen, cellulose and polysaccharide gums. Specific monosaccharides include C5 and above (e.g., C5, C6, C7, or C8) sugars; di- and trisaccharides include sugars having two or three monosaccharide units (e.g., C5, C6, C7, or C8).

[0239] In one embodiment, a carbohydrate conjugate for use in the compositions and methods of the invention is a monosaccharide. In one embodiment, the monosaccharide is an N-acetylgalactosamine, such as

[chemical structure]

[0240] In another embodiment, a carbohydrate conjugate for use in the compositions and methods of the invention is selected from the group consisting of:

[chemical structure]

[chemical structure]

[chemical structure]

[chemical structure]

[chemical structure]

[0241] Another representative carbohydrate conjugate for use in the embodiments described herein includes, but is not limited to,

[chemical structure]

when one of X or Y is an oligonucleotide, the other is a hydrogen.

[0242] In some embodiments, the carbohydrate conjugate further comprises one or more additional ligands as described above, such as, but not limited to, a PK modulator or a cell permeation peptide.

[0243] Additional carbohydrate conjugates (and linkers) suitable for use in the present invention include those described in PCT Publication Nos. WO 2014/179620 and WO 2014/179627, the entire contents of each of which are incorporated herein by reference.

[0244] D. Linkers

[0245] In some embodiments, the conjugate or ligand described herein can be attached to an antisense polynucleotide agent with various linkers that can be cleavable or non-cleavable.

[0246] The term “linker” or “linking group” means an organic moiety that connects two parts of a compound, e.g., covalently attaches two parts of a compound. Linkers typically comprise a direct bond or an atom such as oxygen or sulfur, a unit such as NRB, C(O), C(O)NH, SO, SO₂, SO₂NH or a chain of atoms, such as, but not limited to, substituted or unsubstituted alkyl, substituted or unsubstituted alkenyl, substituted or unsubstituted alkynyl, arylalkyl, arylalkenyl, arylalkynyl, heteroarylalkyl, heteroarylalkenyl, heteroarylalkynyl, heterocyclylalkyl, heterocyclylalkenyl, heterocyclylalkynyl, aryl, heteroaryl, heterocyclyl, cycloalkyl, cycloalkenyl, alkylarylalkyl, alkyl aryl alkenyl, alkylarylalkynyl, alkenylarylalkyl, alkenylarylalkenyl, alkenyl arylalkynyl, alkynylarylalkyl, alkynylarylalkenyl, alkynylarylalkynyl, alkylheteroarylalkyl, alkylheteroarylalkenyl, alkylheteroarylalkynyl, alkenylheteroarylalkyl, alkenylheteroarylalkenyl, alkenylheteroarylalkynyl, alkynylheteroarylalkyl, alkynylheteroarylalkenyl, alkynylheteroarylalkynyl, alkylheterocyclylalkyl, alkylheterocyclylalkenyl, alkylhererocyclylalkynyl, alkenylheterocyclylalkyl, alkenylheterocyclylalkenyl, alkenylheterocyclylalkynyl, alkynylheterocyclylalkyl, alkynylheterocyclylalkenyl, alkynylheterocyclylalkynyl, alkylaryl, alkenylaryl, alkynylaryl, alkylheteroaryl, alkenylheteroaryl, alkynylhereroaryl, which one or more methylenes can be interrupted or terminated by O, S, S(O), SO₂, N(R8), C(O), substituted or unsubstituted aryl, substituted or unsubstituted heteroaryl, substituted or unsubstituted heterocyclic; where R8 is hydrogen, acyl, aliphatic or substituted aliphatic. In one embodiment, the linker is between 1-24 atoms or any subrange within that range, e.g., 2-24, 3-24, 4-24, 5-24, 6-24, 6-18, 7-18, 8-18, 7-17, 8-17, 6-16, 7-16, or 8-16 atoms.

[0247] A cleavable linking group is one which is sufficiently stable outside the cell, but which upon entry into a target cell is cleaved to release the two parts the linker is holding together. In a preferred embodiment, the cleavable linking group is cleaved at least 10 times, 20, times, 30 times, 40 times, 50 times, 60 times, 70 times, 80 times, 90 times or more, or at least 100 times faster in a target cell or under a first reference condition (which can, e.g., be selected to mimic or represent intracellular conditions) than in the blood of a subject, or under a second reference condition (which can, e.g., be selected to mimic or represent conditions found in the blood or serum).

[0248] Cleavable linking groups are susceptible to cleavage agents, e.g., pH, redox potential or the presence of degradative molecules. Generally, cleavage agents are more prevalent or found at higher levels or activities inside cells than in serum or blood. Examples of such degradative agents include: redox agents which are selected for particular substrates or which have no substrate specificity, including, e.g., oxidative or reductive enzymes or reductive agents such as mercaptans, present in cells, that can degrade a redox cleavable linking group by reduction; esterases; endosomes or agents that can create an acidic environment, e.g., those that result in a pH of five or lower; enzymes that can hydrolyze or degrade an acid cleavable linking group by acting as a general acid, peptidases (which can be substrate specific), and phosphatases.

[0249] A cleavable linkage group, such as a disulfide bond can be susceptible to pH. The pH of human serum is 7.4, while the average intracellular pH is slightly lower, ranging from about 7.1-7.3. Endosomes have a more acidic pH, in the range of 5.5-6.0, and lysosomes have an even more acidic pH at around 5.0. Some linkers will have a cleavable linking group that is cleaved at a preferred pH, thereby releasing a cationic lipid from the ligand inside the cell, or into the desired compartment of the cell.

[0250] A linker can include a cleavable linking group that is cleavable by a particular enzyme. The type of cleavable linking group incorporated into a linker can depend on the cell to be targeted. For example, a liver-targeting ligand can be linked to a cationic lipid through a linker that includes an ester group. Liver cells are rich in esterases, and therefore the linker will be cleaved more efficiently in liver cells than in cell types that are not esterase-rich. Other cell-types rich in esterases include cells of the lung, renal cortex, and testis.

[0251] Linkers that contain peptide bonds can be used when targeting cell types rich in peptidases, such as liver cells and synoviocytes.

[0252] In general, the suitability of a candidate cleavable linking group can be evaluated by testing the ability of a degradative agent (or condition) to cleave the candidate linking group. It will also be desirable to also test the candidate cleavable linking group for the ability to resist cleavage in the blood or when in contact with other non-target tissue. Thus, one can determine the relative susceptibility to cleavage between a first and a second condition, where the first is selected to be indicative of cleavage in a target cell and the second is selected to be indicative of cleavage in other tissues or biological fluids, e.g., blood or serum. The evaluations can be carried out in cell free systems, in cells, in cell culture, in organ or tissue culture, or in whole animals. It can be useful to make initial evaluations in cell-free or culture conditions and to confirm by further evaluations in whole animals. In preferred embodiments, useful candidate compounds are cleaved at least 2, 4, 10, 20, 30, 40, 50, 60, 70, 80, 90, or 100 times faster in the cell (or under in vitro conditions selected to mimic intracellular conditions) as compared to blood or serum (or under in vitro conditions selected to mimic extracellular conditions).

[0253] i. Redox cleavable linking groups

[0254] In one embodiment, a cleavable linking group is a redox cleavable linking group that is cleaved upon reduction or oxidation. An example of reductively cleavable linking group is a disulphide linking group (—S—S—). To determine if a candidate cleavable linking group is a suitable “reductively cleavable linking group,” or for example is suitable for use with a particular antisense polynucleotide agent moiety and particular targeting agent one can look to methods described herein. For example, a candidate can be evaluated by incubation with dithiothreitol (DTT), or other reducing agent using reagents know in the art, which mimic the rate of cleavage which would be observed in a cell, e.g., a target cell. The candidates can also be evaluated under conditions which are selected to mimic blood or serum conditions. In one, candidate compounds are cleaved by at most 10% in the blood. In other embodiments, useful candidate compounds are degraded at least 2, 4, 10, 20, 30, 40, 50, 60, 70, 80, 90, or 100 times faster in the cell (or under in vitro conditions selected to mimic intracellular conditions) as compared to blood (or under in vitro conditions selected to mimic extracellular conditions). The rate of cleavage of candidate compounds can be determined using standard enzyme kinetics assays under conditions chosen to mimic intracellular media and compared to conditions chosen to mimic extracellular media.

[0255] ii. Phosphate-based cleavable linking groups

[0256] In another embodiment, a cleavable linker comprises a phosphate-based cleavable linking group. A phosphate-based cleavable linking group is cleaved by agents that degrade or hydrolyze the phosphate group. An example of an agent that cleaves phosphate groups in cells are enzymes such as phosphatases in cells. Examples of phosphate-based linking groups are —O—P(O)(ORk)-O—, —O—P(S)(ORk)-O—, —O—P(S)(SRk)-O—, —S—P(O)(ORk)-O—, —O—P(O)(ORk)—S—, —S—P(O)(ORk)—S—, —O—P(S)(ORk)—S—, —S—P(S)(ORk)-O—, —O—P(O)(Rk)-O—, —O—P(S)(Rk)-O—, —S—P(O)(Rk)-O—, —S—P(S)(Rk)-O—, —S—P(O)(Rk)—S—, —O—P(S)(Rk)—S—. Preferred embodiments are —O—P(O)(OH)—O—, —O—P(S)(OH)—O—, —O—P(S)(SH)—O—, —S—P(O)(OH)—O—, —O—P(O)(OH)—S—, —S—P(O)(OH)—S—, —O—P(S)(OH)—S—, —S—P(S)(OH)—O—, —O—P(O)(H)—O—, —O—P(S)(H)—O—, —S—P(O)(H)—O, —S—P(S)(H)—O—, —S—P(O)(H)—S—, —O—P(S)(H)—S—. A preferred embodiment is —O—P(O)(OH)—O—. These candidates can be evaluated using methods analogous to those described above.

[0257] iii. Acid cleavable linking groups

[0258] In another embodiment, a cleavable linker comprises an acid cleavable linking group. An acid cleavable linking group is a linking group that is cleaved under acidic conditions. In preferred embodiments acid cleavable linking groups are cleaved in an acidic environment with a pH of 6.5 or lower (e.g., 6.0, 5.75, 5.5, 5.25, 5.0, or lower), or by agents such as enzymes that can act as a general acid. In a cell, specific low pH organelles, such as endosomes and lysosomes can provide a cleaving environment for acid cleavable linking groups. Examples of acid cleavable linking groups include but are not limited to hydrazones, esters, and esters of amino acids. Acid cleavable groups can have the general formula —C═NN—, C(O)O, or —OC(O). A preferred embodiment is when the carbon attached to the oxygen of the ester (the alkoxy group) is an aryl group, substituted alkyl group, or tertiary alkyl group such as dimethyl pentyl or t-butyl. These candidates can be evaluated using methods analogous to those described above.

[0259] iv. Ester-based linking groups

[0260] In another embodiment, a cleavable linker comprises an ester-based cleavable linking group. An ester-based cleavable linking group is cleaved by enzymes such as esterases and amidases in cells. Examples of ester-based cleavable linking groups include but are not limited to esters of alkylene, alkenylene and alkynylene groups. Ester cleavable linking groups have the general formula —C(O)O—, or —OC(O)—. These candidates can be evaluated using methods analogous to those described above.

[0261] v. Peptide-based cleaving groups

[0262] In yet another embodiment, a cleavable linker comprises a peptide-based cleavable linking group. A peptide-based cleavable linking group is cleaved by enzymes such as peptidases and proteases in cells. Peptide-based cleavable linking groups are peptide bonds formed between amino acids to yield oligopeptides (e.g., dipeptides, tripeptides etc.) and polypeptides. Peptide-based cleavable groups do not include the amide group (—C(O)NH—).

[0263] The amide group can be formed between any alkylene, alkenylene or alkynelene. A peptide bond is a special type of amide bond formed between amino acids to yield peptides and proteins. The peptide based cleavage group is generally limited to the peptide bond (i.e., the amide bond) formed between amino acids yielding peptides and proteins and does not include the entire amide functional group. Peptide-based cleavable linking groups have the general formula —NHCHRAC(O)NHCHRBC(O)—, where RA and RB are the R groups of the two adjacent amino acids. These candidates can be evaluated using methods analogous to those described above.

[0264] In one embodiment, an antisense polynucleotide agent of the invention is conjugated to a carbohydrate through a linker. Non-limiting examples of antisense polynucleotide agent carbohydrate conjugates with linkers of the compositions and methods of the invention include, but are not limited to,

[chemical structure]

[chemical structure]

[chemical structure]

when one of X or Y is an oligonucleotide, the other is a hydrogen.

[0265] In certain embodiments of the compositions and methods of the invention, a ligand is one or more GalNAc (N-acetylgalactosamine) derivatives attached through a bivalent or trivalent branched linker.

[0266] In one embodiment, a dsRNA of the invention is conjugated to a bivalent or trivalent branched linker selected from the group of structures shown in any of formula (XXXII) −(XXXV):

[chemical structure]

wherein:
[0267] q2A, q2B, q3A, q3B, q4A, q4B, q5A, q5B and q5C represent independently for each occurrence 0-20 and wherein the repeating unit can be the same or different;
[0268] P^{2A}, P^{2B}, P^{3A}, P^{3B}, P^{4A}, P^{4B}, P^{5A}, P^{5B}, P^{5C} , T^{2A}, T^{2B}, T^{3A}, T^{3B}, T^{4A}, T^{4B}, T^{4A}, T^{5B}, T^{5C} are each independently for each occurrence absent, CO, NH, O, S, OC(O), NHC(O), CH₂, CH₂NH or CH₂O;
[0269] Q^{2A}, Q^{2B}, Q^{3A}, Q^{3B}, Q^{4A}, Q^{4B}, Q^{5A}, Q^{5B}, Q^{5C} are independently for each occurrence absent, alkylene, substituted alkylene wherein one or more methylenes can be interrupted or terminated by one or more of O, S, S(O), SO₂, N(R N), C(R′)═C(R″), CC or C(O);
[0270] R^{2A}, R^{2B}, R^{3A}, R^{3B}, R^{4A}, R^{4B}, R^{5A}, R^{5B}, R^{5C} are each independently for each occurrence absent, NH, O, S, CH₂, C(O)O, C(O)NH, NHCH(R^{a})C(O), —C(O)—CH(R^{a})—NH—, CO, CH═N—O,

[chemical structure]

or heterocyclyl;
[0271] L^{2A}, L^{2B}, L^{3A}, L^{3B}, L^{4A}, L^{4B}, L^{5A}, L^{5B} and L^{5C} represent the ligand; i.e. each independently for each occurrence a monosaccharide (such as GalNAc), disaccharide, trisaccharide, tetrasaccharide, oligosaccharide, or polysaccharide; and R^{a} is H or amino acid side chain. Trivalent conjugating GalNAc derivatives are particularly useful for use with RNAi agents for inhibiting the expression of a target gene, such as those of formula (XXXVI):

[chemical structure]

[0272] wherein L^{5A}, L^{5B} and L^{5C} represent a monosaccharide, such as GalNAc derivative.

[0273] Examples of suitable bivalent and trivalent branched linker groups conjugating GalNAc derivatives include, but are not limited to, the structures recited above as formulas II, VII, XI, X, and XIII

[0274] Representative U.S. patents that teach the preparation of RNA conjugates include, but are not limited to, U.S. Pat. Nos. 4,828,979; 4,948,882; 5,218,105; 5,525,465; 5,541,313; 5,545,730; 5,552,538; 5,578,717, 5,580,731; 5,591,584; 5,109,124; 5,118,802; 5,138,045; 5,414,077; 5,486,603; 5,512,439; 5,578,718; 5,608,046; 4,587,044; 4,605,735; 4,667,025; 4,762,779; 4,789,737; 4,824,941; 4,835,263; 4,876,335; 4,904,582; 4,958,013; 5,082,830; 5,112,963; 5,214,136; 5,082,830; 5,112,963; 5,214,136; 5,245,022; 5,254,469; 5,258,506; 5,262,536; 5,272,250; 5,292,873; 5,317,098; 5,371,241, 5,391,723; 5,416,203, 5,451,463; 5,510,475; 5,512,667; 5,514,785; 5,565,552; 5,567,810; 5,574,142; 5,585,481; 5,587,371; 5,595,726; 5,597,696; 5,599,923; 5,599,928 and 5,688,941; 6,294,664; 6,320,017; 6,576,752; 6,783,931; 6,900,297; 7,037,646; 8,106,022, the entire contents of each of which are hereby incorporated herein by reference.

[0275] It is not necessary for all positions in a given compound to be uniformly modified, and in fact more than one of the aforementioned modifications can be incorporated in a single compound or even at a single nucleoside within an antisense polynucleotide agent. The present invention also includes antisense polynucleotide agents that are chimeric compounds.

[0276] “Chimeric” antisense polynucleotide agents or “chimeras,” in the context of this invention, are antisense polynucleotide agent compounds, which contain two or more chemically distinct regions, each made up of at least one monomer unit, i.e., a nucleotide in the case of an anti sense polynucleotide agent. These antisense polynucleotide agents typically contain at least one region wherein the RNA is modified so as to confer upon the antisense polynucleotide agent increased resistance to nuclease degradation, increased cellular uptake, or increased binding affinity for the target nucleic acid. An additional region of the antisense polynucleotide agent can serve as a substrate for enzymes capable of cleaving RNA:DNA or RNA:RNA hybrids. By way of example, RNase H is a cellular endonuclease which cleaves the RNA strand of an RNA:DNA duplex. Activation of RNase H, therefore, results in cleavage of the RNA target, thereby greatly enhancing the efficiency of antisense polynucleotide agent inhibition of gene expression. Consequently, comparable results can often be obtained with shorter antisense polynucleotide agents when chimeric antisense polynucleotide agents are used, compared to phosphorothioate deoxy antisense polynucleotide agents hybridizing to the same target region. Cleavage of the RNA target can be routinely detected by gel electrophoresis and, if necessary, associated nucleic acid hybridization techniques known in the art.

[0277] In certain instances, the nucleotide of an antisense polynucleotide agent can be modified by a non-ligand group. A number of non-ligand molecules have been conjugated to antisense polynucleotide agents in order to enhance the activity, cellular distribution or cellular uptake of the anti sense polynucleotide agent, and procedures for performing such conjugations are available in the scientific literature. Such non-ligand moieties have included lipid moieties, such as cholesterol (Kubo, T. et al., Biochem. Biophys. Res. Comm., 2007, 365(1):54-61; Letsinger et al., Proc. Natl. Acad. Sci. USA, 1989, 86:6553), cholic acid (Manoharan et al., Bioorg. Med. Chem. Lett., 1994, 4:1053), a thioether, e.g., hexyl-S— tritylthiol (Manoharan et al., Ann. N.Y. Acad. Sci., 1992, 660:306; Manoharan et al., Bioorg. Med. Chem. Let., 1993, 3:2765), a thiocholesterol (Oberhauser et al., Nucl. Acids Res., 1992, 20:533), an aliphatic chain, e.g., dodecandiol or undecyl residues (Saison-Behmoaras et al., EMBO J., 1991, 10:111; Kabanov et al., FEBS Lett., 1990, 259:327; Svinarchuk et al., Biochimie, 1993, 75:49), a phospholipid, e.g., di-hexadecyl-rac-glycerol or triethylammonium 1,2-di-O-hexadecyl-rac-glycero-3-H-phosphonate (Manoharan et al., Tetrahedron Lett., 1995, 36:3651; Shea et al., Nucl. Acids Res., 1990, 18:3777), a polyamine or a polyethylene glycol chain (Manoharan et al., Nucleosides & Nucleotides, 1995, 14:969), or adamantane acetic acid (Manoharan et al., Tetrahedron Lett., 1995, 36:3651), a palmityl moiety (Mishra et al., Biochim. Biophys. Acta, 1995, 1264:229), or an octadecylamine or hexylamino-carbonyl-oxycholesterol moiety (Crooke et al., J. Pharmacol. Exp. Ther., 1996, 277:923). Representative United States patents that teach the preparation of such RNA conjugates have been listed above. Typical conjugation protocols involve the synthesis of an RNAs bearing an aminolinker at one or more positions of the sequence. The amino group is then reacted with the molecule being conjugated using appropriate coupling or activating reagents. The conjugation reaction can be performed either with the RNA still bound to the solid support or following cleavage of the RNA, in solution phase. Purification of the RNA conjugate by HPLC typically affords the pure conjugate.

### V. Delivery of an Antisense Polynucleotide Agent of the Invention

[0278] The delivery of an antisense polynucleotide agent of the invention to a cell e.g., a cell within a subject, such as a human subject (e.g., a subject in need thereof, such as a subject having a PD-L1-associated disease) can be achieved in a number of different ways. For example, delivery may be performed by contacting a cell with an antisense polynucleotide agent of the invention either in vitro or in vivo. In vivo delivery may also be performed directly by administering a composition comprising an antisense polynucleotide agent to a subject.

[0279] In general, any method of delivering a nucleic acid molecule (in vitro or in vivo) can be adapted for use with an antisense polynucleotide agent of the invention (see e.g., Akhtar S. and Julian R L. (1992) Trends Cell. Biol. 2(5):139-144 and WO94/02595, which are incorporated herein by reference in their entireties). For in vivo delivery, factors to consider in order to deliver an antisense polynucleotide agent include, for example, biological stability of the delivered molecule, prevention of non-specific effects, and accumulation of the delivered molecule in the target tissue. The non-specific effects of an antisense polynucleotide agent can be minimized by local administration, for example, by direct injection or implantation into a tissue or topically administering the preparation. Local administration to a treatment site maximizes local concentration of the agent, limits the exposure of the agent to systemic tissues that can otherwise be harmed by the agent or that can degrade the agent, and permits a lower total dose of the antisense polynucleotide agent to be administered.

[0280] Several studies have shown successful knockdown of gene products when an antisense polynucleotide agent is administered locally. For example, intraocular delivery of a VEGF antisense polynucleotide agent by intravitreal injection in cynomolgus monkeys (Tolentino, M J., et al (2004) Retina 24:132-138) and subretinal injections in mice (Reich, S J., et al (2003) Mol. Vis. 9:210-216) were both shown to prevent neovascularization in an experimental model of age-related macular degeneration. In addition, direct intratumoral injection of a antisense polynucleotide agent in mice reduces tumor volume (Pille, J., et al (2005) Mol. Ther 0.11:267-274) and can prolong survival of tumor-bearing mice (Kim, W J., et al (2006) Mol. Ther. 14:343-350; Li, S., et al (2007) Mol. Ther. 15:515-523). RNA interference has also shown success with local delivery to the CNS by direct injection (Dorn, G., et al. (2004) Nucleic Acids 32:e49; Tan, P H., et al (2005) Gene Ther. 12:59-66; Makimura, H., et al (2002) BMC Neurosci. 3:18; Shishkina, G T., et al (2004) Neuroscience 129:521-528; Thakker, E R., et al (2004) Proc. Natl. Acad. Sci. U.S.A. 101:17270-17275; Akaneya,Y., et al (2005) 1 Neurophysiol. 93:594-602) and to the lungs by intranasal administration (Howard, K A., et al (2006) Mol. Ther. 14:476-484; Zhang, X., et al (2004) J. Biol. Chem. 279:10677-10684; Bitko, V., et al (2005) Nat. Med. 11:50-55).

[0281] For administering an antisense polynucleotide agent systemically for the treatment of a disease, the agent can be modified or alternatively delivered using a drug delivery system; both methods act to prevent the rapid degradation of the antisense polynucleotide agent by endo- and exo-nucleases in vivo. Modification of the agent or the pharmaceutical carrier can also permit targeting of the antisense polynucleotide agent composition to the target tissue and avoid undesirable off-target effects. Antisense polynucleotide agent can be modified by chemical conjugation to lipophilic groups such as cholesterol to enhance cellular uptake and prevent degradation. In an alternative embodiment, the antisense polynucleotide agent can be delivered using drug delivery systems such as a nanoparticle, a dendrimer, a polymer, liposomes, or a cationic delivery system. Positively charged cationic delivery systems facilitate binding of an antisense polynucleotide agent molecule (negatively charged) and also enhance interactions at the negatively charged cell membrane to permit efficient uptake of an antisense polynucleotide agent by the cell. Cationic lipids, dendrimers, or polymers can either be bound to an antisense polynucleotide agent, or induced to form a vesicle or micelle (see e.g., Kim S H., et al (2008) Journal of Controlled Release 129(2):107-116) that encases an antisense polynucleotide agent. The formation of vesicles or micelles further prevents degradation of the antisense polynucleotide agent when administered systemically.

[0282] Methods for making and administering cationic-antisense polynucleotide agent complexes are well within the abilities of one skilled in the art (see e.g., Sorensen, D R., et al (2003)J Mol. Biol 327:761-766; Verma, U N, et al (2003) Clin. Cancer Res. 9:1291-1300; Arnold, A S et al (2007)J. Hypertens. 25:197-205, which are incorporated herein by reference in their entirety). Some non-limiting examples of drug delivery systems useful for systemic delivery of anti sense polynucleotide agents include DOTAP (Sorensen, D R., et al (2003), supra; Verma, U N., et al (2003), supra), Oligofectamine, “solid nucleic acid lipid particles” (Zimmermann, T S., et al (2006) Nature 441:111-114), cardiolipin (Chien, P Y., et al (2005) Cancer Gene Ther. 12:321-328; Pal, A., et al (2005) Int J Oncol. 26:1087-1091), polyethyleneimine (Bonnet M E., et al (2008) Pharm. Res. August 16 Epub ahead of print; Aigner, A. (2006) J. Biomed. Biotechnol. 71659), Arg-Gly-Asp (RGD) peptides (Liu, S. (2006) Mol. Pharm. 3:472-487), and polyamidoamines (Tomalia, D A., et al (2007) Biochem. Soc. Trans. 35:61-67; Yoo, H., et al (1999) Pharm. Res. 16:1799-1804). In some embodiments, an antisense polynucleotide agent forms a complex with cyclodextrin for systemic administration. Methods for administration and pharmaceutical compositions of antisense polynucleotide agents and cyclodextrins can be found in U.S. Pat. No. 7,427,605, which is herein incorporated by reference in its entirety.

### VI. Pharmaceutical Compositions of the Invention

[0283] The present invention also includes pharmaceutical compositions and formulations which include the anti sense polynucleotide agents of the invention. In one embodiment, provided herein are pharmaceutical compositions containing an antisense polynucleotide agent, as described herein, and a pharmaceutically acceptable carrier.

[0284] The phrase “pharmaceutically acceptable” is employed herein to refer to those compounds, materials, compositions, or dosage forms which are, within the scope of sound medical judgment, suitable for use in contact with the tissues of human subjects and animal subjects without excessive toxicity, irritation, allergic response, or other problem or complication, commensurate with a reasonable benefit/risk ratio.

[0285] The phrase “pharmaceutically-acceptable carrier” as used herein means a pharmaceutically-acceptable material, composition or vehicle, such as a liquid or solid filler, diluent, excipient, manufacturing aid (e.g., lubricant, talc magnesium, calcium or zinc stearate, or steric acid), or solvent encapsulating material, involved in carrying or transporting the subject compound from one organ, or portion of the body, to another organ, or portion of the body. Each carrier must be “acceptable” in the sense of being compatible with the other ingredients of the formulation and not injurious to the subject being treated. Some examples of materials which can serve as pharmaceutically-acceptable carriers include: (1) sugars, such as lactose, glucose and sucrose; (2) starches, such as corn starch and potato starch; (3) cellulose, and its derivatives, such as sodium carboxymethyl cellulose, ethyl cellulose and cellulose acetate; (4) powdered tragacanth; (5) malt; (6) gelatin; (7) lubricating agents, such as magnesium state, sodium lauryl sulfate and talc; (8) excipients, such as cocoa butter and suppository waxes; (9) oils, such as peanut oil, cottonseed oil, safflower oil, sesame oil, olive oil, corn oil and soybean oil; (10) glycols, such as propylene glycol; (11) polyols, such as glycerin, sorbitol, mannitol and polyethylene glycol; (12) esters, such as ethyl oleate and ethyl laurate; (13) agar; (14) buffering agents, such as magnesium hydroxide and aluminum hydroxide; (15) alginic acid; (16) pyrogen-free water; (17) isotonic saline; (18) Ringer's solution; (19) ethyl alcohol; (20) pH buffered solutions; (21) polyesters, polycarbonates or polyanhydrides; (22) bulking agents, such as polypeptides and amino acids (23) serum components, such as serum albumin, HDL and LDL; and (22) other non-toxic compatible substances employed in pharmaceutical formulations.

[0286] The pharmaceutical compositions containing the antisense polynucleotide agents are useful for treating a disease or disorder associated with the expression or activity of a PD-L1 gene, e.g. a PD-L1-associated disease. Such pharmaceutical compositions are formulated based on the mode of delivery. One example is compositions that are formulated for systemic administration via parenteral delivery, e.g., by subcutaneous (SC) or intravenous (IV) delivery. The pharmaceutical compositions of the invention may be administered in dosages sufficient to inhibit expression of a PD-L1 gene. In general, a suitable dose of an antisense polynucleotide agent of the invention will be in the range of 0.001 to 200.0 milligrams per kilogram body weight of the recipient per day, generally in the range of 1 to 50 mg per kilogram body weight per day. For example, the antisense polynucleotide agent can be administered at 0.01 mg/kg, 0.05 mg/kg, 0.5 mg/kg, 1 mg/kg, 1.5 mg/kg, 2 mg/kg, 3 mg/kg, 10 mg/kg, 20 mg/kg, 30 mg/kg, 40 mg/kg, or 50 mg/kg per single dose.

[0287] For example, the antisense polynucleotide agent may be administered at a dose of about 0.1, 0.2, 0.3, 0.4, 0.5, 0.6, 0.7, 0.8, 0.9, 1, 1.1, 1.2, 1.3, 1.4, 1.5, 1.6, 1.7, 1.8, 1.9, 2, 2.1, 2.2, 2.3, 2.4, 2.5, 2.6, 2.7, 2.8, 2.9, 3, 3.1, 3.2, 3.3, 3.4, 3.5, 3.6, 3.7, 3.8, 3.9, 4, 4.1, 4.2, 4.3, 4.4, 4.5, 4.6, 4.7, 4.8, 4.9, 5, 5.1, 5.2, 5.3, 5.4, 5.5, 5.6, 5.7, 5.8, 5.9, 6, 6.1, 6.2, 6.3, 6.4, 6.5, 6.6, 6.7, 6.8, 6.9, 7, 7.1, 7.2, 7.3, 7.4, 7.5, 7.6, 7.7, 7.8, 7.9, 8, 8.1, 8.2, 8.3, 8.4, 8.5, 8.6, 8.7, 8.8, 8.9, 9, 9.1, 9.2, 9.3, 9.4, 9.5, 9.6, 9.7, 9.8, 9.9, 10, 11, 12, 13, 14, 15, 16, 17, 18, 19, 20, 21, 2, 23, 24, 25, 26, 27, 28, 29, 30, 31, 32, 33, 34, 35, 36, 37, 38, 39, 40, 41, 42, 43, 44, 45, 46, 47, 48, 49, or 50 mg/kg. Values and ranges intermediate to the recited values are also intended to be part of this invention.

[0288] In another embodiment, the antisense polynucleotide agent is administered at a dose of about 0.1 to 50 mg/kg, 0.25 to 50 mg/kg, 0.5 to 50 mg/kg, 0.75 to 50 mg/kg, 1 to 50 mg/mg, 1.5 to 50 mg/kb, 2 to 50 mg/kg, 2.5 to 50 mg/kg, 3 to 50 mg/kg, 3.5 to 50 mg/kg, 4 to 50 mg/kg, 4.5 to 50 mg/kg, 5 to 50 mg/kg, 7.5 to 50 mg/kg, 10 to 50 mg/kg, 15 to 50 mg/kg, to 50 mg/kg, 20 to 50 mg/kg, 25 to 50 mg/kg, 25 to 50 mg/kg, 30 to 50 mg/kg, 35 to 50 mg/kg, 40 to 50 mg/kg, 45 to 50 mg/kg, 0.1 to 45 mg/kg, 0.25 to 45 mg/kg, 0.5 to 45 mg/kg, 0.75 to 45 mg/kg, 1 to 45 mg/mg, 1.5 to 45 mg/kb, 2 to 45 mg/kg, 2.5 to 45 mg/kg, 3 to 45 mg/kg, 3.5 to 45 mg/kg, 4 to 45 mg/kg, 4.5 to 45 mg/kg, 5 to 45 mg/kg, 7.5 to 45 mg/kg, 10 to 45 mg/kg, 15 to 45 mg/kg, 20 to 45 mg/kg, 20 to 45 mg/kg, 25 to 45 mg/kg, 25 to 45 mg/kg, 30 to 45 mg/kg, 35 to 45 mg/kg, 40 to 45 mg/kg, 0.1 to 40 mg/kg, 0.25 to 40 mg/kg, 0.5 to 40 mg/kg, 0.75 to 40 mg/kg, 1 to 40 mg/mg, 1.5 to 40 mg/kb, 2 to 40 mg/kg, 2.5 to 40 mg/kg, 3 to 40 mg/kg, 3.5 to 40 mg/kg, 4 to 40 mg/kg, 4.5 to 40 mg/kg, 5 to 40 mg/kg, 7.5 to 40 mg/kg, 10 to 40 mg/kg, 15 to 40 mg/kg, 20 to 40 mg/kg, 20 to 40 mg/kg, 25 to 40 mg/kg, to 40 mg/kg, 30 to 40 mg/kg, 35 to 40 mg/kg, 0.1 to 30 mg/kg, 0.25 to 30 mg/kg, 0.5 to 30 mg/kg, 0.75 to 30 mg/kg, 1 to 30 mg/mg, 1.5 to 30 mg/kb, 2 to 30 mg/kg, 2.5 to 30 mg/kg, 3 to 30 mg/kg, 3.5 to 30 mg/kg, 4 to 30 mg/kg, 4.5 to 30 mg/kg, 5 to 30 mg/kg, 7.5 to 30 mg/kg, 10 to 30 mg/kg, 15 to 30 mg/kg, 20 to 30 mg/kg, 20 to 30 mg/kg, 25 to 30 mg/kg, 0.1 to 20 mg/kg, 0.25 to 20 mg/kg, 0.5 to 20 mg/kg, 0.75 to 20 mg/kg, 1 to 20 mg/mg, 1.5 to 20 mg/kb, 2 to 20 mg/kg, 2.5 to 20 mg/kg, 3 to 20 mg/kg, 3.5 to 20 mg/kg, 4 to 20 mg/kg, 4.5 to 20 mg/kg, 5 to 20 mg/kg, 7.5 to 20 mg/kg, 10 to 20 mg/kg, or 15 to 20 mg/kg. Values and ranges intermediate to the recited values are also intended to be part of this invention.

[0289] For example, the antisense polynucleotide agent may be administered at a dose of about 0.01, 0.02, 0.03, 0.04, 0.05, 0.06, 0.07, 0.08, 0.09, 0.1, 0.2, 0.3, 0.4, 0.5, 0.6, 0.7, 0.8, 0.9, 1, 1.1, 1.2, 1.3, 1.4, 1.5, 1.6, 1.7, 1.8, 1.9, 2, 2.1, 2.2, 2.3, 2.4, 2.5, 2.6, 2.7, 2.8, 2.9, 3, 3.1, 3.2, 3.3, 3.4, 3.5, 3.6, 3.7, 3.8, 3.9, 4, 4.1, 4.2, 4.3, 4.4, 4.5, 4.6, 4.7, 4.8, 4.9, 5, 5.1, 5.2, 5.3, 5.4, 5.5, 5.6, 5.7, 5.8, 5.9, 6, 6.1, 6.2, 6.3, 6.4, 6.5, 6.6, 6.7, 6.8, 6.9, 7, 7.1, 7.2, 7.3, 7.4, 7.5, 7.6, 7.7, 7.8, 7.9, 8, 8.1, 8.2, 8.3, 8.4, 8.5, 8.6, 8.7, 8.8, 8.9, 9, 9.1, 9.2, 9.3, 9.4, 9.5, 9.6, 9.7, 9.8, 9.9, 10, 11, 12, 13, 14, 15, 16, 17, 18, 19, 20, 21, 2, 23, 24, 25, 26, 27, 28, 29, 30, 31, 32, 33, 34, 35, 36, 37, 38, 39, 40, 41, 42, 43, 44, 45, 46, 47, 48, 49, or 50 mg/kg. Values and ranges intermediate to the recited values are also intended to be part of this invention.

[0290] In another embodiment, the antisense polynucleotide agent is administered at a dose of about 0.5 to 50 mg/kg, 0.75 to 50 mg/kg, 1 to 50 mg/mg, 1.5 to 50 mg/kgb, 2 to 50 mg/kg, 2.5 to 50 mg/kg, 3 to 50 mg/kg, 3.5 to 50 mg/kg, 4 to 50 mg/kg, 4.5 to 50 mg/kg, 5 to 50 mg/kg, 7.5 to 50 mg/kg, 10 to 50 mg/kg, 15 to 50 mg/kg, 20 to 50 mg/kg, 20 to 50 mg/kg, 25 to 50 mg/kg, 25 to 50 mg/kg, 30 to 50 mg/kg, 35 to 50 mg/kg, 40 to 50 mg/kg, 45 to 50 mg/kg, 0.5 to 45 mg/kg, 0.75 to 45 mg/kg, 1 to 45 mg/mg, 1.5 to 45 mg/kb, 2 to 45 mg/kg, 2.5 to 45 mg/kg, 3 to 45 mg/kg, 3.5 to 45 mg/kg, 4 to 45 mg/kg, 4.5 to 45 mg/kg, 5 to 45 mg/kg, 7.5 to 45 mg/kg, 10 to 45 mg/kg, 15 to 45 mg/kg, 20 to 45 mg/kg, 20 to 45 mg/kg, 25 to 45 mg/kg, 25 to 45 mg/kg, 30 to 45 mg/kg, 35 to 45 mg/kg, 40 to 45 mg/kg, 0.5 to 40 mg/kg, 0.75 to 40 mg/kg, 1 to 40 mg/mg, 1.5 to 40 mg/kb, 2 to 40 mg/kg, 2.5 to 40 mg/kg, 3 to 40 mg/kg, 3.5 to 40 mg/kg, 4 to 40 mg/kg, 4.5 to 40 mg/kg, 5 to 40 mg/kg, 7.5 to 40 mg/kg, 10 to 40 mg/kg, 15 to 40 mg/kg, 20 to 40 mg/kg, 20 to 40 mg/kg, 25 to 40 mg/kg, 25 to 40 mg/kg, 30 to 40 mg/kg, 35 to 40 mg/kg, 0.5 to 30 mg/kg, 0.75 to 30 mg/kg, 1 to 30 mg/mg, 1.5 to 30 mg/kb, 2 to 30 mg/kg, 2.5 to 30 mg/kg, 3 to 30 mg/kg, 3.5 to 30 mg/kg, 4 to 30 mg/kg, 4.5 to 30 mg/kg, 5 to 30 mg/kg, 7.5 to 30 mg/kg, 10 to 30 mg/kg, 15 to 30 mg/kg, to 30 mg/kg, 20 to 30 mg/kg, 25 to 30 mg/kg, 0.5 to 20 mg/kg, 0.75 to 20 mg/kg, 1 to 20 mg/kg, 1.5 to 20 mg/kg, 2 to 20 mg/kg, 2.5 to 20 mg/kg, 3 to 20 mg/kg, 3.5 to 20 mg/kg, 4 to 20 mg/kg, 4.5 to 20 mg/kg, 5 to 20 mg/kg, 7.5 to 20 mg/kg, 10 to 20 mg/kg, or 15 to 20 mg/kg. In one embodiment, the antisense polynucleotide agent is administered at a dose of 10 mg/kg to 30 mg/kg. Values and ranges intermediate to the recited values are also intended to be part of this invention.

[0291] For example, subjects can be administered, e.g., subcutaneously or intravenously, a single therapeutic amount of antisense polynucleotide agent, such as about 0.1, 0.15, 0.2, 0.25, 0.3, 0.35, 0.4, 0.45, 0.5, 0.55, 0.6, 0.65, 0.7, 0.75, 0.8, 0.85, 0.9, 0.95, 1, 1.1, 1.2, 1.3, 1.4, 1.5, 1.6, 1.7, 1.8, 1.9, 2, 2.1, 2.2, 2.3, 2.4, 2.5, 2.6, 2.7, 2.8, 2.9, 3, 3.1, 3.2, 3.3, 3.4, 3.5, 3.6, 3.7, 3.8, 3.9, 4, 4.1, 4.2, 4.3, 4.4, 4.5, 4.6, 4.7, 4.8, 4.9, 5, 5.1, 5.2, 5.3, 5.4, 5.5, 5.6, 5.7, 5.8, 5.9, 6, 6.1, 6.2, 6.3, 6.4, 6.5, 6.6, 6.7, 6.8, 6.9, 7, 7.1, 7.2, 7.3, 7.4, 7.5, 7.6, 7.7, 7.8, 7.9, 8, 8.1, 8.2, 8.3, 8.4, 8.5, 8.6, 8.7, 8.8, 8.9, 9, 9.1, 9.2, 9.3, 9.4, 9.5, 9.6, 9.7, 9.8, 9.9, 10, 10.5, 11, 11.5, 12, 12.5, 13, 13.5, 14, 14.5, 15, 15.5, 16, 16.5, 17, 17.5, 18, 18.5, 19, 19.5, 20, 20.5, 21, 21.5, 22, 22.5, 23, 23.5, 24, 24.5, 25, 25.5, 26, 26.5, 27, 27.5, 28, 28.5, 29, 29.5, 30, 31, 32, 33, 34, 34, 35, 36, 37, 38, 39, 40, 41, 42, 43, 44, 45, 46, 47, 48, 49, or 50 mg/kg. Values and ranges intermediate to the recited values are also intended to be part of this invention.

[0292] In some embodiments, subjects are administered, e.g., subcutaneously or intravenously, multiple doses of a therapeutic amount of antisense polynucleotide agent, such as a dose about 0.1, 0.15, 0.2, 0.25, 0.3, 0.35, 0.4, 0.45, 0.5, 0.55, 0.6, 0.65, 0.7, 0.75, 0.8, 0.85, 0.9, 0.95, 1, 1.1, 1.2, 1.3, 1.4, 1.5, 1.6, 1.7, 1.8, 1.9, 2, 2.1, 2.2, 2.3, 2.4, 2.5, 2.6, 2.7, 2.8, 2.9, 3, 3.1, 3.2, 3.3, 3.4, 3.5, 3.6, 3.7, 3.8, 3.9, 4, 4.1, 4.2, 4.3, 4.4, 4.5, 4.6, 4.7, 4.8, 4.9, 5, 5.1, 5.2, 5.3, 5.4, 5.5, 5.6, 5.7, 5.8, 5.9, 6, 6.1, 6.2, 6.3, 6.4, 6.5, 6.6, 6.7, 6.8, 6.9, 7, 7.1, 7.2, 7.3, 7.4, 7.5, 7.6, 7.7, 7.8, 7.9, 8, 8.1, 8.2, 8.3, 8.4, 8.5, 8.6, 8.7, 8.8, 8.9, 9, 9.1, 9.2, 9.3, 9.4, 9.5, 9.6, 9.7, 9.8, 9.9, 10, 10.5, 11, 11.5, 12, 12.5, 13, 13.5, 14, 14.5, 15, 15.5, 16, 16.5, 17, 17.5, 18, 18.5, 19, 19.5, 20, 20.5, 21, 21.5, 22, 22.5, 23, 23.5, 24, 24.5, 25, 25.5, 26, 26.5, 27, 27.5, 28, 28.5, 29, 29.5, 30, 31, 32, 33, 34, 34, 35, 36, 37, 38, 39, 40, 41, 42, 43, 44, 45, 46, 47, 48, 49, or 50 mg/kg. A multi-dose regimine may include administration of a therapeutic amount of antisense polynucleotide agent daily, such as for two days, three days, four days, five days, six days, seven days, or longer.

[0293] In other embodiments, subjects are administered, e.g., subcutaneously or intravenously, a repeat dose of a therapeutic amount of antisense polynucleotide agent, such as a dose of about 0.1, 0.15, 0.2, 0.25, 0.3, 0.35, 0.4, 0.45, 0.5, 0.55, 0.6, 0.65, 0.7, 0.75, 0.8, 0.85, 0.9, 0.95, 1, 1.1, 1.2, 1.3, 1.4, 1.5, 1.6, 1.7, 1.8, 1.9, 2, 2.1, 2.2, 2.3, 2.4, 2.5, 2.6, 2.7, 2.8, 2.9, 3, 3.1, 3.2, 3.3, 3.4, 3.5, 3.6, 3.7, 3.8, 3.9, 4, 4.1, 4.2, 4.3, 4.4, 4.5, 4.6, 4.7, 4.8, 4.9, 5, 5.1, 5.2, 5.3, 5.4, 5.5, 5.6, 5.7, 5.8, 5.9, 6, 6.1, 6.2, 6.3, 6.4, 6.5, 6.6, 6.7, 6.8, 6.9, 7, 7.1, 7.2, 7.3, 7.4, 7.5, 7.6, 7.7, 7.8, 7.9, 8, 8.1, 8.2, 8.3, 8.4, 8.5, 8.6, 8.7, 8.8, 8.9, 9, 9.1, 9.2, 9.3, 9.4, 9.5, 9.6, 9.7, 9.8, 9.9, 10, 10.5, 11, 11.5, 12, 12.5, 13, 13.5, 14, 14.5, 15, 15.5, 16, 16.5, 17, 17.5, 18, 18.5, 19, 19.5, 20, 20.5, 21, 21.5, 22, 22.5, 23, 23.5, 24, 24.5, 25, 25.5, 26, 26.5, 27, 27.5, 28, 28.5, 29, 29.5, 30, 31, 32, 33, 34, 34, 35, 36, 37, 38, 39, 40, 41, 42, 43, 44, 45, 46, 47, 48, 49, or 50 mg/kg. A repeat-dose regimine may include administration of a therapeutic amount of antisense polynucleotide agent on a regular basis, such as every other day, every third day, every fourth day, twice a week, once a week, every other week, or once a month.

[0294] The pharmaceutical composition can be administered by intravenous infusion over a period of time, such as over about a 5, 6, 7, 8, 9, 10, 11, 12, 13, 14, 15, 16, 17, 18, 19, 20, and 21, 22, 23, 24, 25, 26, 27, 28, or 29 minute period. In certain embodiments, the infusion is administered over about 0.5, 1, 1.5, 2, 2.5, 3, 3.5, or 4 hours. The administration may be repeated, for example, on a regular basis, such as weekly, biweekly (i.e., every two weeks) for one month, two months, three months, four months or longer. After an initial treatment regimen, the treatments can be administered on a less frequent basis. For example, after administration weekly or biweekly for three months, administration can be repeated once per month, for six months or a year or longer.

[0295] The pharmaceutical composition can be administered once daily, or the antisense polynucleotide agent can be administered as two, three, or more sub-doses at appropriate intervals throughout the day or even using continuous infusion or delivery through a controlled release formulation. In that case, the antisense polynucleotide agent contained in each sub-dose must be correspondingly smaller in order to achieve the total daily dosage. The dosage unit can also be compounded for delivery over several days, e.g., using a conventional sustained release formulation which provides sustained release of the antisense polynucleotide agent over a several day period. Sustained release formulations are well known in the art and are particularly useful for delivery of agents at a particular site, such as could be used with the agents of the present invention. In this embodiment, the dosage unit contains a corresponding multiple of the daily dose.

[0296] In other embodiments, a single dose of the pharmaceutical compositions can be long lasting, such that subsequent doses are administered at not more than 3, 4, or 5 day intervals, or at not more than 1, 2, 3, or 4 week intervals. In some embodiments of the invention, a single dose of the pharmaceutical compositions of the invention is administered once per week. In other embodiments of the invention, a single dose of the pharmaceutical compositions of the invention is administered bi-monthly.

[0297] The skilled artisan will appreciate that certain factors can influence the dosage and timing required to effectively treat a subject, including but not limited to the severity of the disease or disorder, previous treatments, the general health or age of the subject, and other diseases present. Moreover, treatment of a subject with a therapeutically effective amount of a composition can include a single treatment or a series of treatments. Estimates of effective dosages and in vivo half-lives for the individual antisense polynucleotide agents encompassed by the invention can be made using conventional methodologies or on the basis of in vivo testing using an appropriate animal model, as described elsewhere herein.

[0298] Advances in mouse genetics have generated a number of mouse models for the study of various human diseases, such as a disorder that would benefit from reduction in the expression of PD-L1. Such models can be used for in vivo testing of an antisense polynucleotide agent, as well as for determining a therapeutically effective dose.

[0299] For example, animal models of hepatitis B infection are known in the art including chimpanzee, woodchuck, and transgenic mouse models of HBV (Wieland, 2015. Cold Spring Harb. Perspect. Med., 5:a021469, 2015; Tennant and Gerin, 2001. ILAR Journal, 42:89-102; and Moriyama et al., 1990. Science, 248:361-364). The chimpanzee model can also be used as a model for hepatitis D infection. A large number of cancer models including chemically induced and xenograft tumors are known in the art.

[0300] The pharmaceutical compositions of the present invention can be administered in a number of ways depending upon whether local or systemic treatment is desired and upon the area to be treated. Administration can be topical (e.g., by a transdermal patch), pulmonary, e.g., by inhalation or insufflation of powders or aerosols, including by nebulizer; intratracheal, intranasal, epidermal and transdermal, oral or parenteral. Parenteral administration includes intravenous, intraarterial, subcutaneous, intraperitoneal, or intramuscular injection or infusion; subdermal, e.g., via an implanted device; or intracranial, e.g., by intraparenchymal, intrathecal or intraventricular administration.

[0301] The pharmaceutical compositions of the present invention can be administered in a number of ways depending upon whether local or systemic treatment is desired and upon the area to be treated. Administration can be topical (e.g., by a transdermal patch), pulmonary, e.g., by inhalation or insufflation of powders or aerosols, including by nebulizer; intratracheal, intranasal, epidermal and transdermal, oral or parenteral. Parenteral administration includes intravenous, intraarterial, subcutaneous, intraperitoneal or intramuscular injection or infusion; subdermal, e.g., via an implanted device; or intracranial, e.g., by intraparenchymal, intrathecal or intraventricular, administration.

[0302] The antisense polynucleotide agent can be delivered in a manner to target a particular tissue, such as the liver (e.g., the hepatocytes of the liver).

[0303] Pharmaceutical compositions and formulations for topical administration can include transdermal patches, ointments, lotions, creams, gels, drops, suppositories, sprays, liquids and powders. Conventional pharmaceutical carriers, aqueous, powder or oily bases, thickeners and the like can be necessary or desirable. Coated condoms, gloves and the like can also be useful. Suitable topical formulations include those in which the antisense polynucleotide agents featured in the invention are in admixture with a topical delivery agent such as lipids, liposomes, fatty acids, fatty acid esters, steroids, chelating agents and surfactants. Suitable lipids and liposomes include neutral (e.g., dioleoylphosphatidyl DOPE ethanolamine, dimyristoylphosphatidyl choline D1VIPC, distearolyphosphatidyl choline) negative (e.g., dimyristoylphosphatidyl glycerol DMPG) and cationic (e.g., dioleoyltetramethylaminopropyl DOTAP and dioleoylphosphatidyl ethanolamine DOTMA). Antisense polynucleotide agents featured in the invention can be encapsulated within liposomes or can form complexes thereto, in particular to cationic liposomes. Alternatively, antisense polynucleotide agents can be complexed to lipids, in particular to cationic lipids. Suitable fatty acids and esters include but are not limited to arachidonic acid, oleic acid, eicosanoic acid, lauric acid, caprylic acid, capric acid, myristic acid, palmitic acid, stearic acid, linoleic acid, linolenic acid, dicaprate, tricaprate, monoolein, dilaurin, glyceryl 1-monocaprate, 1-dodecylazacycloheptan-2-one, an acylcarnitine, an acylcholine, or a C₁₋₂₀ alkyl ester (e.g., isopropylmyristate IPM), monoglyceride, diglyceride or pharmaceutically acceptable salt thereof). Topical formulations are described in detail in U.S. Pat. No. 6,747,014, which is incorporated herein by reference.

[0304] A. Antisense Polynucleotide Agent Formulations Comprising Membranous Molecular Assemblies

[0305] An antisense polynucleotide agent for use in the compositions and methods of the invention can be formulated for delivery in a membranous molecular assembly, e.g., a liposome or a micelle. As used herein, the term “liposome” refers to a vesicle composed of amphiphilic lipids arranged in at least one bilayer, e.g., one bilayer or a plurality of bilayers. Liposomes include unilamellar and multilamellar vesicles that have a membrane formed from a lipophilic material and an aqueous interior. The aqueous portion contains the antisense

[0306] MEI 47024063v.1 polynucleotide agent composition. The lipophilic material isolates the aqueous interior from an aqueous exterior, which typically does not include the antisense polynucleotide agent composition, although in some examples, it may. Liposomes are useful for the transfer and delivery of active ingredients to the site of action. Because the liposomal membrane is structurally similar to biological membranes, when liposomes are applied to a tissue, the liposomal bilayer fuses with bilayer of the cellular membranes. As the merging of the liposome and cell progresses, the internal aqueous contents that include the antisense polynucleotide agent are delivered into the cell where the antisense polynucleotide agent can specifically bind to a target RNA and can mediate antisense inhibition. In some cases the liposomes are also specifically targeted, e.g., to direct the antisense polynucleotide agent to particular cell types.

[0307] A liposome containing an antisense polynucleotide agent can be prepared by a variety of methods. In one example, the lipid component of a liposome is dissolved in a detergent so that micelles are formed with the lipid component. For example, the lipid component can be an amphipathic cationic lipid or lipid conjugate. The detergent can have a high critical micelle concentration and may be nonionic. Exemplary detergents include cholate, CHAPS, octylglucoside, deoxycholate, and lauroyl sarcosine. The antisense polynucleotide agent preparation is then added to the micelles that include the lipid component. The cationic groups on the lipid interact with the antisense polynucleotide agent and condense around the antisense polynucleotide agent to form a liposome. After condensation, the detergent is removed, e.g., by dialysis, to yield a liposomal preparation of antisense polynucleotide agent.

[0308] If necessary a carrier compound that assists in condensation can be added during the condensation reaction, e.g., by controlled addition. For example, the carrier compound can be a polymer other than a nucleic acid (e.g., spermine or spermidine). pH can also be adjusted to favor condensation.

[0309] Methods for producing stable polynucleotide delivery vehicles, which incorporate a polynucleotide/cationic lipid complex as structural components of the delivery vehicle, are further described in, e.g., WO 96/37194, the entire contents of which are incorporated herein by reference. Liposome formation can also include one or more aspects of exemplary methods described in Felgner, P. L. et al., Proc. Natl. Acad. Sci., USA 8:7413-7417, 1987; U.S. Pat. Nos. 4,897,355; 5,171,678; Bangham, et al. M Mol. Biol. 23:238, 1965; Olson, et al. Biochim. Biophys. Acta 557:9, 1979; Szoka, et al. Proc. Natl. Acad. Sci. 75: 4194, 1978; Mayhew, et al. Biochim. Biophys. Acta 775:169, 1984; Kim, et al. Biochim. Biophys. Acta 728:339, 1983; and Fukunaga, et al. Endocrinol. 115:757, 1984. Commonly used techniques for preparing lipid aggregates of appropriate size for use as delivery vehicles include sonication and freeze-thaw plus extrusion (see, e.g., Mayer, et al. Biochim. Biophys. Acta 858:161, 1986). Microfluidization can be used when consistently small (50 to 200 nm) and relatively uniform aggregates are desired (Mayhew, et al. Biochim. Biophys. Acta 775:169, 1984). These methods are readily adapted to packaging antisense polynucleotide agent preparations into liposomes.

[0310] Liposomes fall into two broad classes. Cationic liposomes are positively charged liposomes which interact with the negatively charged nucleic acid molecules to form a stable complex. The positively charged nucleic acid/liposome complex binds to the negatively charged cell surface and is internalized in an endosome. Due to the acidic pH within the endosome, the liposomes are ruptured, releasing their contents into the cell cytoplasm (Wang et al., Biochem. Biophys. Res. Commun., 1987, 147, 980-985).

[0311] Liposomes which are pH-sensitive or negatively-charged, entrap nucleic acids rather than complex with it. Since both the nucleic acid and the lipid are similarly charged, repulsion rather than complex formation occurs. Nevertheless, some nucleic acid is entrapped within the aqueous interior of these liposomes. pH-sensitive liposomes have been used to deliver nucleic acids encoding the thymidine kinase gene to cell monolayers in culture. Expression of the exogenous gene was detected in the target cells (Zhou et al., Journal of Controlled Release, 1992, 19, 269-274).

[0312] One major type of liposomal composition includes phospholipids other than naturally-derived phosphatidylcholine. Neutral liposome compositions, for example, can be formed from dimyristoyl phosphatidylcholine (DMPC) or dipalmitoyl phosphatidylcholine (DPPC). Anionic liposome compositions generally are formed from dimyristoyl phosphatidylglycerol, while anionic fusogenic liposomes are formed primarily from dioleoyl phosphatidylethanolamine (DOPE). Another type of liposomal composition is formed from phosphatidylcholine (PC) such as, for example, soybean PC, and egg PC. Another type is formed from mixtures of phospholipid or phosphatidylcholine or cholesterol.

[0313] Examples of other methods to introduce liposomes into cells in vitro and in vivo include U.S. Pat. Nos. 5,283,185; 5,171,678; WO 94/00569; WO 93/24640; WO 91/16024; Felgner, J. Biol. Chem. 269:2550, 1994; Nabel, Proc. Natl. Acad. Sci. 90:11307, 1993; Nabel, Human Gene Ther. 3:649, 1992; Gershon, Biochem. 32:7143, 1993; and Strauss EMBO J. 11:417, 1992.

[0314] Non-ionic liposomal systems have also been examined to determine their utility in the delivery of drugs to the skin, in particular systems comprising non-ionic surfactant and cholesterol. Non-ionic liposomal formulations comprising Novasome™ I (glyceryl dilaurate/cholesterol/polyoxyethylene-10-stearyl ether) and Novasome™ II (glyceryl distearate/cholesterol/polyoxyethylene-10-stearyl ether) were used to deliver cyclosporin-A into the dermis of mouse skin. Results indicated that such non-ionic liposomal systems were effective in facilitating the deposition of cyclosporine A into different layers of the skin (Hu et al. S.T.P.Pharma. Sci., 1994, 4(6) 466).

[0315] Liposomes also include “sterically stabilized” liposomes, a term which, as used herein, refers to liposomes comprising one or more specialized lipids that, when incorporated into liposomes, result in enhanced circulation lifetimes relative to liposomes lacking such specialized lipids. Examples of sterically stabilized liposomes are those in which part of the vesicle-forming lipid portion of the liposome (A) comprises one or more glycolipids, such as monosialoganglioside G_{M1}, or (B) is derivatized with one or more hydrophilic polymers, such as a polyethylene glycol (PEG) moiety. While not wishing to be bound by any particular theory, it is thought in the art that, at least for sterically stabilized liposomes containing gangliosides, sphingomyelin, or PEG-derivatized lipids, the enhanced circulation half-life of these sterically stabilized liposomes derives from a reduced uptake into cells of the reticuloendothelial system (RES) (Allen et al., FEBS Letters, 1987, 223, 42; Wu et al., Cancer Research, 1993, 53, 3765).

[0316] Various liposomes comprising one or more glycolipids are known in the art. Papahadjopoulos et al. (Ann. N.Y. Acad. Sci., 1987, 507, 64) reported the ability of monosialoganglioside G_{M1}, galactocerebroside sulfate and phosphatidylinositol to improve blood half-lives of liposomes. These findings were expounded upon by Gabizon et al. (Proc. Natl. Acad. Sci. U.S.A., 1988, 85, 6949). U.S. Pat. No. 4,837,028 and WO 88/04924, both to Allen et al., disclose liposomes comprising (1) sphingomyelin and (2) the ganglioside G_{M1} or a galactocerebroside sulfate ester. U.S. Pat. No. 5,543,152 (Webb et al.) discloses liposomes comprising sphingomyelin. Liposomes comprising 1,2-sn-dimyristoylphosphatidylcholine are disclosed in WO 97/13499 (Lim et al).

[0317] In one embodiment, cationic liposomes are used. Cationic liposomes possess the advantage of being able to fuse to the cell membrane. Non-cationic liposomes, although not able to fuse as efficiently with the plasma membrane, are taken up by macrophages in vivo and can be used to deliver antisense polynucleotide agents to macrophages.

[0318] Further advantages of liposomes include: liposomes obtained from natural phospholipids are biocompatible and biodegradable; liposomes can incorporate a wide range of water and lipid soluble drugs; liposomes can protect encapsulated antisense polynucleotide agents in their internal compartments from metabolism and degradation (Rosoff, in “Pharmaceutical Dosage Forms,” Lieberman, Rieger and Banker (Eds.), 1988, volume 1, p. 245). Important considerations in the preparation of liposome formulations are the lipid surface charge, vesicle size and the aqueous volume of the liposomes.

[0319] A positively charged synthetic cationic lipid, N-[1-(2,3-dioleyloxy)propyl]-N,N,N-trimethylammonium chloride (DOTMA) can be used to form small liposomes that interact spontaneously with nucleic acid to form lipid-nucleic acid complexes which are capable of fusing with the negatively charged lipids of the cell membranes of tissue culture cells, resulting in delivery of Antisense polynucleotide agent (see, e.g., Felgner, P. L. et al., Proc. Natl. Acad. Sci., USA 8:7413-7417, 1987 and U.S. Pat. No. 4,897,355 for a description of DOTMA and its use with DNA).

[0320] A DOTMA analogue, 1,2-bis(oleoyloxy)-3-(trimethylammonia)propane (DOTAP) can be used in combination with a phospholipid to form DNA-complexing vesicles. Lipofectin™ Bethesda Research Laboratories, Gaithersburg, Md.) is an effective agent for the delivery of highly anionic nucleic acids into living tissue culture cells that comprise positively charged DOTMA liposomes which interact spontaneously with negatively charged polynucleotides to form complexes. When enough positively charged liposomes are used, the net charge on the resulting complexes is also positive. Positively charged complexes prepared in this way spontaneously attach to negatively charged cell surfaces, fuse with the plasma membrane, and efficiently deliver functional nucleic acids into, for example, tissue culture cells. Another commercially available cationic lipid, 1,2-bis(oleoyloxy)-3,3-(trimethylammonia)propane (“DOTAP”) (Boehringer Mannheim, Indianapolis, Indiana) differs from DOTMA in that the oleoyl moieties are linked by ester, rather than ether linkages.

[0321] Other reported cationic lipid compounds include those that have been conjugated to a variety of moieties including, for example, carboxyspermine which has been conjugated to one of two types of lipids and includes compounds such as 5-carboxyspermylglycine dioctaoleoylamide (“DOGS”) (Transfectam™, Promega, Madison, Wisconsin) and dipalmitoylphosphatidylethanolamine 5-carboxyspermyl-amide (“DPPES”) (see, e.g., U.S. Pat. No. 5,171,678).

[0322] Another cationic lipid conjugate includes derivatization of the lipid with cholesterol (“DC-Chol”) which has been formulated into liposomes in combination with DOPE (See, Gao, X. and Huang, L., Biochim. Biophys. Res. Commun. 179:280, 1991). Lipopolylysine, made by conjugating polylysine to DOPE, has been reported to be effective for transfection in the presence of serum (Zhou, X. et al., Biochim. Biophys. Acta 1065:8, 1991). For certain cell lines, these liposomes containing conjugated cationic lipids, are said to exhibit lower toxicity and provide more efficient transfection than the DOTMA-containing compositions. Other commercially available cationic lipid products include DMRIE and DMRIE-HP (Vical, La Jolla, California) and Lipofectamine (DOSPA) (Life Technology, Inc., Gaithersburg, Maryland). Other cationic lipids suitable for the delivery of oligonucleotides are described in WO 98/39359 and WO 96/37194.

[0323] Liposomal formulations are particularly suited for topical administration; liposomes present several advantages over other formulations. Such advantages include reduced side effects related to high systemic absorption of the administered drug, increased accumulation of the administered drug at the desired target, and the ability to administer an antisense polynucleotide agent into the skin. In some implementations, liposomes are used for delivering antisense polynucleotide agenst to epidermal cells and also to enhance the penetration of anti sense polynucleotide agenst into dermal tissues, e.g., into skin. For example, the liposomes can be applied topically. Topical delivery of drugs formulated as liposomes to the skin has been documented (see, e.g., Weiner et al., Journal of Drug Targeting, 1992, vol. 2,405-410 and du Plessis et al., Antiviral Research, 18, 1992, 259-265; Mannino, R. J. and Fould-Fogerite, S., Biotechniques 6:682-690, 1988; Itani, T. et al. Gene 56:267-276. 1987; Nicolau, C. et al. Meth. Enz. 149:157-176, 1987; Straubinger, R. M. and Papahadjopoulos, D. Meth. Enz. 101:512-527, 1983; Wang, C. Y. and Huang, L., Proc. Natl. Acad. Sci. USA 84:7851-7855, 1987).

[0324] Non-ionic liposomal systems have also been examined to determine their utility in the delivery of drugs to the skin, in particular systems comprising non-ionic surfactant and cholesterol. Non-ionic liposomal formulations comprising Novasome I (glyceryl dilaurate/cholesterol/polyoxyethylene-10-stearyl ether) and Novasome II (glyceryl di stearate/cholesterol/polyoxyethylene-10-stearyl ether) were used to deliver a drug into the dermis of mouse skin. Such formulations with antisense polynucleotide agents are useful for treating a dermatological disorder.

[0325] Liposomes that include antisense polynucleotide agent can be made highly deformable. Such deformability can enable the liposomes to penetrate through pore that are smaller than the average radius of the liposome. For example, transfersomes are a type of deformable liposomes. Transferosomes can be made by adding surface edge activators, usually surfactants, to a standard liposomal composition. Transfersomes that include antisense polynucleotide agents can be delivered, for example, subcutaneously by infection in order to deliver anti sense polynucleotide agents to keratinocytes in the skin. In order to cross intact mammalian skin, lipid vesicles must pass through a series of fine pores, each with a diameter less than 50 nm, under the influence of a suitable transdermal gradient. In addition, due to the lipid properties, these transferosomes can be self-optimizing (adaptive to the shape of pores, e.g., in the skin), self-repairing, and can frequently reach their targets without fragmenting, and often self-loading.

[0326] Other formulations amenable to the present invention are described in WO2009088892, WO2009086558, WO2009132131, and WO2008042973.

[0327] Transfersomes are yet another type of liposomes, and are highly deformable lipid aggregates which are attractive candidates for drug delivery vehicles. Transfersomes can be described as lipid droplets which are so highly deformable that they are easily able to penetrate through pores which are smaller than the droplet. Transfersomes are adaptable to the environment in which they are used, e.g., they are self-optimizing (adaptive to the shape of pores in the skin), self-repairing, frequently reach their targets without fragmenting, and often self-loading. To make transfersomes it is possible to add surface edge-activators, usually surfactants, to a standard liposomal composition. Transfersomes have been used to deliver serum albumin to the skin. The transfer some-mediated delivery of serum albumin has been shown to be as effective as subcutaneous injection of a solution containing serum albumin.

[0328] Surfactants find wide application in formulations such as emulsions (including microemulsions) and liposomes. The most common way of classifying and ranking the properties of the many different types of surfactants, both natural and synthetic, is by the use of the hydrophile/lipophile balance (HLB). The nature of the hydrophilic group (also known as the “head”) provides the most useful means for categorizing the different surfactants used in formulations (Rieger, in “Pharmaceutical Dosage Forms”, Marcel Dekker, Inc., New York, N.Y., 1988, p. 285).

[0329] If the surfactant molecule is not ionized, it is classified as a nonionic surfactant. Nonionic surfactants find wide application in pharmaceutical and cosmetic products and are usable over a wide range of pH values. In general their HLB values range from 2 to 18 depending on their structure. Nonionic surfactants include nonionic esters such as ethylene glycol esters, propylene glycol esters, glyceryl esters, polyglyceryl esters, sorbitan esters, sucrose esters, and ethoxylated esters. Nonionic alkanolamides and ethers such as fatty alcohol ethoxylates, propoxylated alcohols, and ethoxylated/propoxylated block polymers are also included in this class. The polyoxyethylene surfactants are the most popular members of the nonionic surfactant class.

[0330] If the surfactant molecule carries a negative charge when it is dissolved or dispersed in water, the surfactant is classified as anionic. Anionic surfactants include carboxylates such as soaps, acyl lactylates, acyl amides of amino acids, esters of sulfuric acid such as alkyl sulfates and ethoxylated alkyl sulfates, sulfonates such as alkyl benzene sulfonates, acyl isethionates, acyl taurates and sulfosuccinates, and phosphates. The most important members of the anionic surfactant class are the alkyl sulfates and the soaps.

[0331] If the surfactant molecule carries a positive charge when it is dissolved or dispersed in water, the surfactant is classified as cationic. Cationic surfactants include quaternary ammonium salts and ethoxylated amines. The quaternary ammonium salts are the most used members of this class.

[0332] If the surfactant molecule has the ability to carry either a positive or negative charge, the surfactant is classified as amphoteric. Amphoteric surfactants include acrylic acid derivatives, substituted alkylamides, N-alkylbetaines and phosphatides.

[0333] The use of surfactants in drug products, formulations and in emulsions has been reviewed (Rieger, in “Pharmaceutical Dosage Forms”, Marcel Dekker, Inc., New York, N.Y., 1988, p. 285).

[0334] The antisense polynucleotide agent for use in the compositions and methods of the invention can also be provided as micellar formulations. “Micelles” are defined herein as a particular type of molecular assembly in which amphipathic molecules are arranged in a spherical structure such that all the hydrophobic portions of the molecules are directed inward, leaving the hydrophilic portions in contact with the surrounding aqueous phase. The converse arrangement exists if the environment is hydrophobic.

[0335] A mixed micellar formulation suitable for delivery through transdermal membranes may be prepared by mixing an aqueous solution of the antisense polynucleotide agent composition, an alkali metal C₈ to C₂₂ alkyl sulphate, and a micelle forming compounds. Exemplary micelle forming compounds include lecithin, hyaluronic acid, pharmaceutically acceptable salts of hyaluronic acid, glycolic acid, lactic acid, chamomile extract, cucumber extract, oleic acid, linoleic acid, linolenic acid, monoolein, monooleates, monolaurates, borage oil, evening of primrose oil, menthol, trihydroxy oxo cholanyl glycine and pharmaceutically acceptable salts thereof, glycerin, polyglycerin, lysine, polylysine, triolein, polyoxyethylene ethers and analogues thereof, polidocanol alkyl ethers and analogues thereof, chenodeoxycholate, deoxycholate, and mixtures thereof. The micelle forming compounds may be added at the same time or after addition of the alkali metal alkyl sulphate. Mixed micelles will form with substantially any kind of mixing of the ingredients but vigorous mixing in order to provide smaller size micelles.

[0336] In one method a first micellar composition is prepared which contains the antisense polynucleotide agent composition and at least the alkali metal alkyl sulphate. The first micellar composition is then mixed with at least three micelle forming compounds to form a mixed micellar composition. In another method, the micellar composition is prepared by mixing the anti sense polynucleotide agent composition, the alkali metal alkyl sulphate and at least one of the micelle forming compounds, followed by addition of the remaining micelle forming compounds, with vigorous mixing.

[0337] Phenol or m-cresol may be added to the mixed micellar composition to stabilize the formulation and protect against bacterial growth. Alternatively, phenol or m-cresol may be added with the micelle forming ingredients. An isotonic agent such as glycerin may also be added after formation of the mixed micellar composition.

[0338] For delivery of the micellar formulation as a spray, the formulation can be put into an aerosol dispenser and the dispenser is charged with a propellant. The propellant, which is under pressure, is in liquid form in the dispenser. The ratios of the ingredients are adjusted so that the aqueous and propellant phases become one, i.e., there is one phase. If there are two phases, it is necessary to shake the dispenser prior to dispensing a portion of the contents, e.g., through a metered valve. The dispensed dose of pharmaceutical agent is propelled from the metered valve in a fine spray.

[0339] Propellants may include hydrogen-containing chlorofluorocarbons, hydrogen-containing fluorocarbons, dimethyl ether and diethyl ether. In certain embodiments, HFA 134a (1,1,1,2 tetrafluoroethane) may be used.

[0340] The specific concentrations of the essential ingredients can be determined by relatively straightforward experimentation. For absorption through the oral cavities, it is often desirable to increase, e.g., at least double or triple, the dosage for through injection or administration through the gastrointestinal tract.

[0341] B. Lipid particles

[0342] Anti sense polynucleotide agents of in the invention may be fully encapsulated in a lipid formulation, e.g., a LNP, or other nucleic acid-lipid particle.

[0343] As used herein, the term “LNP” refers to a stable nucleic acid-lipid particle comprising a lipid layer encapsulating a pharmaceutically active molecule. LNPs typically contain a cationic lipid, a non-cationic lipid, and a lipid that prevents aggregation of the particle (e.g., a PEG-lipid conjugate). LNPs are extremely useful for systemic applications, as they exhibit extended circulation lifetimes following intravenous (i.v.) injection and accumulate at distal sites (e.g., sites physically separated from the administration site). LNPs include “pSPLP,” which include an encapsulated condensing agent-nucleic acid complex as set forth in PCT Publication No. WO 00/03683. The particles of the present invention typically have a mean diameter of 50 nm to 150 nm, more typically 60 nm to 130 nm, more typically 70 nm to 110 nm, most typically 70 nm to 90 nm, and are substantially nontoxic. In addition, the nucleic acids when present in the nucleic acid-lipid particles of the present invention are resistant in aqueous solution to degradation with a nuclease. Nucleic acid-lipid particles and their method of preparation are disclosed in, e.g., U.S. Pat. Nos. 5,976,567; 5,981,501; 6,534,484; 6,586,410; 6,815,432; 6,858,225; 8,158,601; and 8,058,069; U.S. Publication No. 2010/0324120 and PCT Publication No. WO 96/40964.

[0344] In one embodiment, the lipid to drug ratio (mass/mass ratio) (e.g., lipid to antisense polynucleotide agent ratio) will be in the range of from 1:1 to 50:1, from 1:1 to 25:1, from 3:1 to 15:1, from 4:1 to 10:1, from 5:1 to 9:1, or 6:1 to 9:1. Ranges intermediate to the above recited ranges are also contemplated to be part of the invention.

[0345] The cationic lipid can be, for example, N,N-dioleyl-N,N-dimethylammonium chloride (DODAC), N,N-distearyl-N,N-dimethylammonium bromide (DDAB), N—(I-(2,3-dioleoyloxy)propyl)-N,N,N-trimethylammonium chloride (DOTAP), N—(I-(2,3-dioleyloxy)propyl)-N,N,N-trimethylammonium chloride (DOTMA), N,N-dimethyl-2,3-dioleyloxy)propylamine (DODMA), 1,2-DiLinoleyloxy-N,N-dimethylaminopropane (DLinDMA), 1,2-Dilinolenyloxy-N,N-dimethylaminopropane (DLenDMA), 1,2-Dilinoleylcarbamoyloxy-3-dimethylaminopropane (DLin-C-DAP), 1,2-Dilinoleyoxy-3-(dimethylamino)acetoxypropane (DLin-DAC), 1,2-Dilinoleyoxy-3-morpholinopropane (DLin-MA), 1,2-Dilinoleoyl-3-dimethylaminopropane (DLinDAP), 1,2-Dilinoleylthio-3-dimethylaminopropane (DLin-S-DMA), 1-Linoleoyl-2-linoleyloxy-3-dimethylaminopropane (DLin-2-DMAP), 1,2-Dilinoleyloxy-3-trimethylaminopropane chloride salt (DLin-TMA.Cl), 1,2-Dilinoleoyl-3-trimethylaminopropane chloride salt (DLin-TAP.Cl), 1,2-Dilinoleyloxy-3-(N-methylpiperazino)propane (DLin-MPZ), or 3-(N,N-Dilinoleylamino)-1,2-propanediol (DLinAP), 3-(N,N-Dioleylamino)-1,2-propanedio (DOAP), 1,2-Dilinoleyloxo-3-(2-N,N-dimethylamino)ethoxypropane (DLin-EG-DMA), 1,2-Dilinolenyloxy-N,N-dimethylaminopropane (DLinDMA), 2,2-Dilinoleyl-4-dimethylaminomethyl-[1,3]-dioxolane (DLin-K-DMA) or analogs thereof, (3aR,5s,6a5)-N,N-dimethyl-2,2-di((9Z,12Z)-octadeca-9,12-dienyl)tetrahydro-3aH-cyclopenta[d] [1,3] dioxo1-5-amine (ALN100), (6Z,9Z,28Z,31Z)-heptatriaconta-6,9,28,31-tetraen-19-yl 4-(dimethylamino)butanoate (MC3), 1,1′-(2-(4-(2-((2-(bis(2-hydroxydodecyl)amino)ethyl)(2-hydroxydodecyl)amino)ethyl)piperazin-1-ypethylazanediyl)didodecan-2-ol (Tech G1), or a mixture thereof. The cationic lipid can comprise from 20 mol % to 50 mol % or 40 mol % of the total lipid present in the particle.

[0346] In another embodiment, the compound 2,2-Dilinoleyl-4-dimethylaminoethyl-[1,3]-dioxolane can be used to prepare lipid-santisense polynucleotide agent nanoparticles. Synthesis of 2,2-Dilinoleyl-4-dimethylaminoethyl-[1,3]-dioxolane is described in U.S. provisional patent application No. 61/107,998 filed on Oct. 23, 2008, which is herein incorporated by reference.

[0347] In one embodiment, the lipid-antisense polynucleotide agent particle includes 40% 2, 2-Dilinoleyl-4-dimethylaminoethyl[1,3]-dioxolane: 10% DSPC: 40% Cholesterol: 10% PEG-C-DOMG (mole percent) with a particle size of 63.0±20 nm and a 0.027 antisense polynucleotide agent/Lipid Ratio.

[0348] The ionizable/non-cationic lipid can be an anionic lipid or a neutral lipid including, but not limited to, distearoylphosphatidylcholine (DSPC), dioleoylphosphatidylcholine (DOPC), dipalmitoylphosphatidylcholine (DPPC), dioleoylphosphatidylglycerol (DOPG), dipalmitoylphosphatidylglycerol (DPPG), dioleoyl-phosphatidylethanolamine (DOPE), palmitoyloleoylphosphatidylcholine (POPC), palmitoyloleoylphosphatidylethanolamine (POPE), dioleoyl-phosphatidylethanolamine 4-(N-maleimidomethyl)-cyclohexane-1-carboxylate (DOPE-mal), dipalmitoyl phosphatidyl ethanolamine (DPPE), dimyristoylphosphoethanolamine (DMPE), distearoyl-phosphatidyl-ethanolamine (DSPE), 16-O-monomethyl PE, 16-O-dimethyl PE, 18-1-trans PE, 1 -stearoyl-2-oleoyl-phosphatidyethanolamine (SOPE), cholesterol, or a mixture thereof. The non-cationic lipid can be from 5 mol % to 90 mol %, 10 mol %, or 58 mol % if cholesterol is included, of the total lipid present in the particle.

[0349] The conjugated lipid that inhibits aggregation of particles can be, for example, a polyethyleneglycol (PEG)-lipid including, without limitation, a PEG-diacylglycerol (DAG), a PEG-dialkyloxypropyl (DAA), a PEG-phospholipid, a PEG-ceramide (Cer), or a mixture thereof. The PEG-DAA conjugate can be, for example, a PEG-dilauryloxypropyl (Ci₂), a PEG-dimyristyloxypropyl (Ci₄), a PEG-dipalmityloxypropyl (Ci₆), or a PEG-distearyloxypropyl (C]₈). The conjugated lipid that prevents aggregation of particles can be from 0 mol % to 20 mol % or 2 mol % of the total lipid present in the particle.

[0350] In some embodiments, the nucleic acid-lipid particle further includes cholesterol at, e.g., 10 mol % to 60 mol % or 48 mol % of the total lipid present in the particle.

[0351] In one embodiment, the lipidoid ND98.4HCl (MW 1487) (see U.S. patent application Ser. No. 12/056,230, filed Mar. 26, 2008, which is incorporated herein by reference), Cholesterol (Sigma-Aldrich), and PEG-Ceramide C16 (Avanti Polar Lipids) can be used to prepare lipid-antisense polynucleotide agent nanoparticles (i.e., LNP01 particles). Stock solutions of each in ethanol can be prepared as follows: ND98, 133 mg/ml; Cholesterol, 25 mg/ml, PEG-Ceramide C16, 100 mg/ml. The ND98, Cholesterol, and PEG-Ceramide C16 stock solutions can then be combined in a, e.g., 42:48:10 molar ratio. The combined lipid solution can be mixed with aqueous antisense polynucleotide agent (e.g., in sodium acetate pH 5) such that the final ethanol concentration is 35-45% and the final sodium acetate concentration is 100-300 mM. Lipid-antisense polynucleotide agent nanoparticles typically form spontaneously upon mixing. Depending on the desired particle size distribution, the resultant nanoparticle mixture can be extruded through a polycarbonate membrane (e.g., 100 nm cut-off) using, for example, a thermobarrel extruder, such as Lipex Extruder (Northern Lipids, Inc). In some cases, the extrusion step can be omitted. Ethanol removal and simultaneous buffer exchange can be accomplished by, for example, dialysis or tangential flow filtration. Buffer can be exchanged with, for example, phosphate buffered saline (PBS) at pH 7, e.g., pH 6.9, pH 7.0, pH 7.1, pH 7.2, pH 7.3, or pH 7.4.

[chemical structure]

[0352] LNP01 formulations are described, e.g., in International Application Publication No. WO 2008/042973, which is hereby incorporated by reference.

[0353] Additional exemplary lipid-antisense polynucleotide agent formulations are described in Table 1.

TABLE 1
Exemplary lipid formulations

| | | cationic lipid/non-cationic |
|---|---|---|
| | | lipid/cholesterol/PEG-lipid conjugate |
| | | Lipid:santisense polynucleotide agent |
| | Ionizable/Cationic Lipid | ratio |
| SNALP-1 | 1,2-Dilinolenyloxy-N,N- | DLinDMA/DPPC/Cholesterol/PEG-cDMA |
| | dimethylaminopropane (DLinDMA) | (57.1/7.1/34.4/1.4) |
| | | lipid:santisense polynucleotide agent ~7:1 |
| 2-XTC | 2,2-Dilinoleyl-4-dimethylaminoethyl- | XTC/DPPC/Cholesterol/PEG-cDMA |
| | [1,3]-dioxolane (XTC) | 57.1/7.1/34.4/1.4 |
| | | lipid:santisense polynucleotide agent ~7:1 |
| LNP05 | 2,2-Dilinoleyl-4-dimethylaminoethyl- | XTC/DSPC/Cholesterol/PEG-DMG |
| | [1,3]-dioxolane (XTC) | 57.5/7.5/31.5/3.5 |
| | | lipid:santisense polynucleotide agent ~6:1 |
| LNP06 | 2,2-Dilinoleyl-4-dimethylaminoethyl- | XTC/DSPC/Cholesterol/PEG-DMG |
| | [1,3]-dioxolane (XTC) | 57.5/7.5/31.5/3.5 |
| | | lipid:santisense polynucleotide agent ~11:1 |
| LNP07 | 2,2-Dilinoleyl-4-dimethylaminoethyl- | XTC/DSPC/Cholesterol/PEG-DMG |
| | [1,3]-dioxolane (XTC) | 60/7.5/31/1.5, |
| | | lipid:santisense polynucleotide agent ~6:1 |
| LNP08 | 2,2-Dilinoleyl-4-dimethylaminoethyl- | XTC/DSPC/Cholesterol/PEG-DMG |
| | [1,3]-dioxolane (XTC) | 60/7.5/31/1.5, |
| | | lipid:santisense polynucleotide agent ~11:1 |
| LNP09 | 2,2-Dilinoleyl-4-dimethylaminoethyl- | XTC/DSPC/Cholesterol/PEG-DMG |
| | [1,3]-dioxolane (XTC) | 50/10/38.5/1.5 |
| | | Lipid:santisense polynucleotide agent 10:1 |
| LNP10 | (3aR,5s,6aS)-N,N-dimethyl-2,2- | ALN100/DSPC/Cholesterol/PEG-DMG |
| | di((9Z, 12Z)-octadeca-9,12- | 50/10/38.5/1.5 |
| | dienyl)tetrahydro-3aH- | Lipid:santisense polynucleotide agent 10:1 |
| | cyclopenta[d][1,3]dioxol-5-amine | |
| | (ALN100) | |
| LNP11 | (6Z,9Z,28Z,31Z)-heptatriaconta- | MC-3/DSPC/Cholesterol/PEG-DMG |
| | 6,9,28,31-tetraen-19-yl 4- | 50/10/38.5/1.5 |
| | (dimethylamino)butanoate (MC3) | Lipid:santisense polynucleotide agent 10:1 |
| LNP12 | 1,1′-(2-(4-(2-((2-(bis(2- | Tech G1/DSPC/Cholesterol/PEG-DMG |
| | hydroxydodecyl)amino)ethyl)(2- | 50/10/38.5/1.5 |
| | hydroxydodecyl)amino)ethyl)piperazin- | Lipid:santisense polynucleotide agent 10:1 |
| | 1-yl)ethylazanediyl)didodecan-2-ol | |
| | (Tech G1) | |
| LNP13 | XTC | XTC/DSPC/Chol/PEG-DMG |
| | | 50/10/38.5/1.5 |
| | | Lipid:santisense polynucleotide agent: |
| | | 33:1 |
| LNP14 | MC3 | MC3/DSPC/Chol/PEG-DMG |
| | | 40/15/40/5 |
| | | Lipid:santisense polynucleotide agent: |
| | | 11:1 |
| LNP15 | MC3 | MC3/DSPC/Chol/PEG-DSG/GalNAc- |
| | | PEG-DSG |
| | | 50/10/35/4.5/0.5 |
| | | Lipid:santisense polynucleotide agent: |
| | | 11:1 |
| LNP16 | MC3 | MC3/DSPC/Chol/PEG-DMG |
| | | 50/10/38.5/1.5 |
| | | Lipid:santisense polynucleotide agent: |
| | | 7:1 |
| LNP17 | MC3 | MC3/DSPC/Chol/PEG-DSG |
| | | 50/10/38.5/1.5 |
| | | Lipid:santisense polynucleotide agent: |
| | | 10:1 |
| LNP18 | MC3 | MC3/DSPC/Chol/PEG-DMG |
| | | 50/10/38.5/1.5 |
| | | Lipid:santisense polynucleotide agent: |
| | | 12:1 |
| LNP19 | MC3 | MC3/DSPC/Chol/PEG-DMG |
| | | 50/10/35/5 |
| | | Lipid:santisense polynucleotide agent: |
| | | 8:1 |
| LNP20 | MC3 | MC3/DSPC/Chol/PEG-DPG |
| | | 50/10/38.5/1.5 |
| | | Lipid:santisense polynucleotide agent: |
| | | 10:1 |
| LNP21 | C12-200 | C12-200/DSPC/Chol/PEG-DSG |
| | | 50/10/38.5/1.5 |
| | | Lipid:santisense polynucleotide agent: |
| | | 7:1 |
| LNP22 | XTC | XTC/DSPC/Chol/PEG-DSG |
| | | 50/10/38.5/1.5 |
| | | Lipid:santisense polynucleotide agent: |
| | | 10:1 |

DSPC: distearoylphosphatidylcholine
DPPC: dipalmitoylphosphatidylcholine
PEG-DMG: PEG-didimyristoyl glycerol (C14-PEG, or PEG-C14) (PEG with avg mol wt of 2000)
PEG-DSG: PEG-distyryl glycerol (C18-PEG, or PEG-C18) (PEG with avg mol wt of 2000)
PEG-cDMA: PEG-carbamoyl-1,2-dimyristyloxypropylamine (PEG with avg mol wt of 2000)
SNALP (l,2-Dilinolenyloxy-N,N-dimethylaminopropane (DLinDMA)) comprising formulations are described in International Publication No. WO2009/127060, which is hereby incorporated by reference.
XTC comprising formulations are described in WO2010008537, which is hereby incorporated by reference.
MC3 comprising formulations are described in U.S. Publication No. 2010/0324120, filed Jun. 10, 2010, the entire contents of which are hereby incorporated by reference.
ALNY-100 comprising formulations are described inWO201054406, which is hereby incorporated by reference.
C12-200 comprising formulations are described in WO2010129709, which is hereby incorporated by reference.

[0354] Compositions and formulations for oral administration include powders or granules, microparticulates, nanoparticulates, suspensions or solutions in water or non-aqueous media, capsules, gel capsules, sachets, tablets or minitablets. Thickeners, flavoring agents, diluents, emulsifiers, dispersing aids or binders can be desirable. In some embodiments, oral formulations are those in which the antisense polynucleotide agents featured in the invention are administered in conjunction with one or more penetration enhancer surfactants and chelators. Suitable surfactants include fatty acids or esters or salts thereof, bile acids or salts thereof. Suitable bile acids/salts include chenodeoxycholic acid (CDCA) and ursodeoxychenodeoxycholic acid (UDCA), cholic acid, dehydrocholic acid, deoxycholic acid, glucholic acid, glycholic acid, glycodeoxycholic acid, taurocholic acid, taurodeoxycholic acid, sodium tauro-24,25-dihydro-fusidate and sodium glycodihydrofusidate. Suitable fatty acids include arachidonic acid, undecanoic acid, oleic acid, lauric acid, caprylic acid, capric acid, myristic acid, palmitic acid, stearic acid, linoleic acid, linolenic acid, dicaprate, tricaprate, monoolein, dilaurin, glyceryl 1-monocaprate, 1-dodecylazacycloheptan-2-one, an acylcarnitine, an acylcholine, or a monoglyceride, a diglyceride or a pharmaceutically acceptable salt thereof (e.g., sodium). In some embodiments, combinations of penetration enhancers are used, for example, fatty acids/salts in combination with bile acids/salts. One exemplary combination is the sodium salt of lauric acid, capric acid and UDCA. Further penetration enhancers include polyoxyethylene-9-lauryl ether, polyoxyethylene-20-cetyl ether. Antisense polynucleotide agents featured in the invention can be delivered orally, in granular form including sprayed dried particles, or complexed to form micro or nanoparticles. Antisense polynucleotide agent complexing agents include poly-amino acids; polyimines; polyacrylates; polyalkylacrylates, polyoxethanes, polyalkylcyanoacrylates; cationized gelatins, albumins, starches, acrylates, polyethyleneglycols (PEG) and starches; polyalkylcyanoacrylates; DEAE-derivatized polyimines, pollulans, celluloses and starches. Suitable complexing agents include chitosan, N-trimethylchitosan, poly-L-lysine, polyhistidine, polyornithine, polyspermines, protamine, polyvinylpyridine, polythiodiethylaminomethylethylene P(TDAE), polyaminostyrene (e.g., p-amino), poly(methylcyanoacrylate), poly(ethylcyanoacrylate), poly(butylcyanoacrylate), poly(isobutylcyanoacrylate), poly(isohexylcynaoacrylate), DEAE-methacrylate, DEAE-hexylacrylate, DEAE-acrylamide, DEAE-albumin and DEAE-dextran, polymethylacrylate, polyhexylacrylate, poly(D,L-lactic acid), poly(DL-lactic-co-glycolic acid (PLGA), alginate, and polyethyleneglycol (PEG). Oral formulations for antisense polynucleotide agents and their preparation are described in detail in U.S. Pat. No. 6,887,906, US Publn. No. 20030027780, and U.S. Pat. No. 6,747,014, each of which is incorporated herein by reference.

[0355] Compositions and formulations for parenteral, intraparenchymal (into the brain), intrathecal, intraventricular or intrahepatic administration can include sterile aqueous solutions which can also contain buffers, diluents and other suitable additives such as, but not limited to, penetration enhancers, carrier compounds and other pharmaceutically acceptable carriers or excipients.

[0356] Pharmaceutical compositions of the present invention include, but are not limited to, solutions, emulsions, and liposome-containing formulations. These compositions can be generated from a variety of components that include, but are not limited to, preformed liquids, self-emulsifying solids and self-emulsifying semisolids. Particularly preferred are formulations that target the liver, e.g., when treating hepatic disorders, e.g., hepatic carcinoma.

[0357] The pharmaceutical formulations of the present invention, which can conveniently be presented in unit dosage form, can be prepared according to conventional techniques well known in the pharmaceutical industry. Such techniques include the step of bringing into association the active ingredients with the pharmaceutical carrier(s) or excipient(s). In general, the formulations are prepared by uniformly and intimately bringing into association the active ingredients with liquid carriers or finely divided solid carriers or both, and then, if necessary, shaping the product.

[0358] The compositions of the present invention can be formulated into any of many possible dosage forms such as, but not limited to, tablets, capsules, gel capsules, liquid syrups, soft gels, suppositories, and enemas. The compositions of the present invention can also be formulated as suspensions in aqueous, non-aqueous or mixed media. Aqueous suspensions can further contain substances which increase the viscosity of the suspension including, for example, sodium carboxymethylcellulose, sorbitol or dextran. The suspension can also contain stabilizers.

[0359] C. Additional Formulations

[0360] i. Emulsions

[0361] The compositions of the present invention can be prepared and formulated as emulsions. Emulsions are typically heterogeneous systems of one liquid dispersed in another in the form of droplets usually exceeding 0.1 μm in diameter (see e.g., Ansel's Pharmaceutical Dosage Forms and Drug Delivery Systems, Allen, LV., Popovich N G., and Ansel H C., 2004, Lippincott Williams & Wilkins (8th ed.), New York, NY; Idson, in Pharmaceutical Dosage Forms, Lieberman, Rieger and Banker (Eds.), 1988, Marcel Dekker, Inc., New York, N.Y., volume 1, p. 199; Rosoff, in Pharmaceutical Dosage Forms, Lieberman, Rieger and Banker (Eds.), 1988, Marcel Dekker, Inc., New York, N.Y., Volume 1, p. 245; Block in Pharmaceutical Dosage Forms, Lieberman, Rieger and Banker (Eds.), 1988, Marcel Dekker, Inc., New York, N.Y., volume 2, p. 335; Higuchi et al., in Remington's Pharmaceutical Sciences, Mack Publishing Co., Easton, Pa., 1985, p. 301). Emulsions are often biphasic systems comprising two immiscible liquid phases intimately mixed and dispersed with each other. In general, emulsions can be of either the water-in-oil (w/o) or the oil-in-water (o/w) variety. When an aqueous phase is finely divided into and dispersed as minute droplets into a bulk oily phase, the resulting composition is called a water-in-oil (w/o) emulsion. Alternatively, when an oily phase is finely divided into and dispersed as minute droplets into a bulk aqueous phase, the resulting composition is called an oil-in-water (o/w) emulsion. Emulsions can contain additional components in addition to the dispersed phases, and the active drug which can be present as a solution in either the aqueous phase, oily phase or itself as a separate phase. Pharmaceutical excipients such as emulsifiers, stabilizers, dyes, and antioxidants can also be present in emulsions as needed. Pharmaceutical emulsions can also be multiple emulsions that are comprised of more than two phases such as, for example, in the case of oil-in-water-in-oil (o/w/o) and water-in-oil-in-water (w/o/w) emulsions. Such complex formulations often provide certain advantages that simple binary emulsions do not. Multiple emulsions in which individual oil droplets of an o/w emulsion enclose small water droplets constitute a w/o/w emulsion. Likewise a system of oil droplets enclosed in globules of water stabilized in an oily continuous phase provides an o/w/o emulsion.

[0362] Emulsions are characterized by little or no thermodynamic stability. Often, the dispersed or discontinuous phase of the emulsion is well dispersed into the external or continuous phase and maintained in this form through the means of emulsifiers or the viscosity of the formulation. Either of the phases of the emulsion can be a semisolid or a solid, as is the case of emulsion-style ointment bases and creams. Other means of stabilizing emulsions entail the use of emulsifiers that can be incorporated into either phase of the emulsion. Emulsifiers can broadly be classified into four categories: synthetic surfactants, naturally occurring emulsifiers, absorption bases, and finely dispersed solids (see e.g., Ansel's Pharmaceutical Dosage Forms and Drug Delivery Systems, Allen, LV., Popovich N G., and Ansel H C., 2004, Lippincott Williams & Wilkins (8th ed.), New York, NY; Idson, in Pharmaceutical Dosage Forms, Lieberman, Rieger and Banker (Eds.), 1988, Marcel Dekker, Inc., New York, N.Y., volume 1, p. 199).

[0363] Synthetic surfactants, also known as surface active agents, have found wide applicability in the formulation of emulsions and have been reviewed in the literature (see e.g., Ansel's Pharmaceutical Dosage Forms and Drug Delivery Systems, Allen, LV., Popovich N G., and Ansel H C., 2004, Lippincott Williams & Wilkins (8th ed.), New York, NY; Rieger, in Pharmaceutical Dosage Forms, Lieberman, Rieger and Banker (Eds.), 1988, Marcel Dekker, Inc., New York, N.Y., volume 1, p. 285; Idson, in Pharmaceutical Dosage Forms, Lieberman, Rieger and Banker (Eds.), Marcel Dekker, Inc., New York, N.Y., 1988, volume 1, p. 199). Surfactants are typically amphiphilic and comprise a hydrophilic and a hydrophobic portion. The ratio of the hydrophilic to the hydrophobic nature of the surfactant has been termed the hydrophile/lipophile balance (HLB) and is a valuable tool in categorizing and selecting surfactants in the preparation of formulations. Surfactants can be classified into different classes based on the nature of the hydrophilic group: nonionic, anionic, cationic and amphoteric (see e.g., Ansel's Pharmaceutical Dosage Forms and Drug Delivery Systems, Allen, LV., Popovich N G., and Ansel H C., 2004, Lippincott Williams & Wilkins (8th ed.), New York, NY Rieger, in Pharmaceutical Dosage Forms, Lieberman, Rieger and Banker (Eds.), 1988, Marcel Dekker, Inc., New York, N.Y., volume 1, p. 285).

[0364] Naturally occurring emulsifiers used in emulsion formulations include lanolin, beeswax, phosphatides, lecithin and acacia. Absorption bases possess hydrophilic properties such that they can soak up water to form w/o emulsions yet retain their semisolid consistencies, such as anhydrous lanolin and hydrophilic petrolatum. Finely divided solids have also been used as good emulsifiers especially in combination with surfactants and in viscous preparations. These include polar inorganic solids, such as heavy metal hydroxides, nonswelling clays such as bentonite, attapulgite, hectorite, kaolin, montmorillonite, colloidal aluminum silicate and colloidal magnesium aluminum silicate, pigments and nonpolar solids such as carbon or glyceryl tristearate.

[0365] A large variety of non-emulsifying materials are also included in emulsion formulations and contribute to the properties of emulsions. These include fats, oils, waxes, fatty acids, fatty alcohols, fatty esters, humectants, hydrophilic colloids, preservatives and antioxidants (Block, in Pharmaceutical Dosage Forms, Lieberman, Rieger and Banker (Eds.), 1988, Marcel Dekker, Inc., New York, N.Y., volume 1, p. 335; Idson, in Pharmaceutical Dosage Forms, Lieberman, Rieger and Banker (Eds.), 1988, Marcel Dekker, Inc., New York, N.Y., volume 1, p. 199).

[0366] Hydrophilic colloids or hydrocolloids include naturally occurring gums and synthetic polymers such as polysaccharides (for example, acacia, agar, alginic acid, carrageenan, guar gum, karaya gum, and tragacanth), cellulose derivatives (for example, carboxymethylcellulose and carboxypropylcellulose), and synthetic polymers (for example, carbomers, cellulose ethers, and carboxyvinyl polymers). These disperse or swell in water to form colloidal solutions that stabilize emulsions by forming strong interfacial films around the dispersed-phase droplets and by increasing the viscosity of the external phase.

[0367] Since emulsions often contain a number of ingredients such as carbohydrates, proteins, sterols and phosphatides that can readily support the growth of microbes, these formulations often incorporate preservatives. Commonly used preservatives included in emulsion formulations include methyl paraben, propyl paraben, quaternary ammonium salts, benzalkonium chloride, esters of p-hydroxybenzoic acid, and boric acid. Antioxidants are also commonly added to emulsion formulations to prevent deterioration of the formulation. Antioxidants used can be free radical scavengers such as tocopherols, alkyl gallates, butylated hydroxyanisole, butylated hydroxytoluene, or reducing agents such as ascorbic acid and sodium metabisulfite, and antioxidant synergists such as citric acid, tartaric acid, and lecithin.

[0368] The application of emulsion formulations via dermatological, oral and parenteral routes and methods for their manufacture have been reviewed in the literature (see e.g., Ansel's Pharmaceutical Dosage Forms and Drug Delivery Systems, Allen, LV., Popovich N G., and Ansel H C., 2004, Lippincott Williams & Wilkins (8th ed.), New York, NY; Idson, in Pharmaceutical Dosage Forms, Lieberman, Rieger and Banker (Eds.), 1988, Marcel Dekker, Inc., New York, N.Y., volume 1, p. 199). Emulsion formulations for oral delivery have been very widely used because of ease of formulation, as well as efficacy from an absorption and bioavailability standpoint (see e.g., Ansel's Pharmaceutical Dosage Forms and Drug Delivery Systems, Allen, LV., Popovich N G., and Ansel H C., 2004, Lippincott Williams & Wilkins (8th ed.), New York, NY; Rosoff, in Pharmaceutical Dosage Forms, Lieberman, Rieger and Banker (Eds.), 1988, Marcel Dekker, Inc., New York, N.Y., volume 1, p. 245; Idson, in Pharmaceutical Dosage Forms, Lieberman, Rieger and Banker (Eds.), 1988, Marcel Dekker, Inc., New York, N.Y., volume 1, p. 199). Mineral-oil base laxatives, oil-soluble vitamins and high fat nutritive preparations are among the materials that have commonly been administered orally as o/w emulsions.

[0369] ii. Microemulsions

[0370] In one embodiment of the present invention, the compositions of antisense polynucleotide agents are formulated as microemulsions. A microemulsion can be defined as a system of water, oil and amphiphile which is a single optically isotropic and thermodynamically stable liquid solution (see e.g., Ansel's Pharmaceutical Dosage Forms and Drug Delivery Systems, Allen, LV., Popovich N G., and Ansel H C., 2004, Lippincott Williams & Wilkins (8th ed.), New York, NY; Rosoff, in Pharmaceutical Dosage Forms, Lieberman, Rieger and Banker (Eds.), 1988, Marcel Dekker, Inc., New York, N.Y., volume 1, p. 245). Typically microemulsions are systems that are prepared by first dispersing an oil in an aqueous surfactant solution and then adding a sufficient amount of a fourth component, generally an intermediate chain-length alcohol to form a transparent system. Therefore, microemulsions have also been described as thermodynamically stable, isotropically clear dispersions of two immiscible liquids that are stabilized by interfacial films of surface-active molecules (Leung and Shah, in: Controlled Release of Drugs: Polymers and Aggregate Systems, Rosoff, M., Ed., 1989, VCH Publishers, New York, pages 185-215). Microemulsions commonly are prepared via a combination of three to five components that include oil, water, surfactant, cosurfactant and electrolyte. Whether the microemulsion is of the water-in-oil (w/o) or an oil-in-water (o/w) type is dependent on the properties of the oil and surfactant used and on the structure and geometric packing of the polar heads and hydrocarbon tails of the surfactant molecules (Schott, in Remington's Pharmaceutical Sciences, Mack Publishing Co., Easton, Pa., 1985, p. 271).

[0371] The phenomenological approach utilizing phase diagrams has been extensively studied and has yielded a comprehensive knowledge, to one skilled in the art, of how to formulate microemulsions (see e.g., Ansel's Pharmaceutical Dosage Forms and Drug Delivery Systems, Allen, LV., Popovich N G., and Ansel H C., 2004, Lippincott Williams & Wilkins (8th ed.), New York, NY; Rosoff, in Pharmaceutical Dosage Forms, Lieberman, Rieger and Banker (Eds.), 1988, Marcel Dekker, Inc., New York, N.Y., volume 1, p. 245; Block, in Pharmaceutical Dosage Forms, Lieberman, Rieger and Banker (Eds.), 1988, Marcel Dekker, Inc., New York, N.Y., volume 1, p. 335). Compared to conventional emulsions, microemulsions offer the advantage of solubilizing water-insoluble drugs in a formulation of thermodynamically stable droplets that are formed spontaneously.

[0372] Surfactants used in the preparation of microemulsions include, but are not limited to, ionic surfactants, non-ionic surfactants, Brij 96, polyoxyethylene oleyl ethers, polyglycerol fatty acid esters, tetraglycerol monolaurate (ML310), tetraglycerol monooleate (M0310), hexaglycerol monooleate (P0310), hexaglycerol pentaoleate (P0500), decaglycerol monocaprate (MCA750), decaglycerol monooleate (M0750), decaglycerol sequioleate (S0750), decaglycerol decaoleate (DA0750), alone or in combination with cosurfactants. The cosurfactant, usually a short-chain alcohol such as ethanol, 1-propanol, and 1-butanol, serves to increase the interfacial fluidity by penetrating into the surfactant film and consequently creating a disordered film because of the void space generated among surfactant molecules. Microemulsions can, however, be prepared without the use of cosurfactants and alcohol-free self-emulsifying microemulsion systems are known in the art. The aqueous phase can typically be, but is not limited to, water, an aqueous solution of the drug, glycerol, PEG300, PEG400, polyglycerols, propylene glycols, and derivatives of ethylene glycol. The oil phase can include, but is not limited to, materials such as Captex 300, Captex 355, Capmul MCM, fatty acid esters, medium chain (C8-C12) mono, di, and tri-glycerides, polyoxyethylated glyceryl fatty acid esters, fatty alcohols, polyglycolized glycerides, saturated polyglycolized C8-C10 glycerides, vegetable oils and silicone oil.

[0373] Microemulsions are particularly of interest from the standpoint of drug solubilization and the enhanced absorption of drugs. Lipid based microemulsions (both o/w and w/o) have been proposed to enhance the oral bioavailability of drugs, including peptides (see e.g., U.S. Pat. Nos. 6,191,105; 7,063,860; 7,070,802; 7,157,099; Constantinides et al., Pharmaceutical Research, 1994, 11, 1385-1390; Ritschel, Meth. Find. Exp. Clin. Pharmacol., 1993, 13, 205). Microemulsions afford advantages of improved drug solubilization, protection of drug from enzymatic hydrolysis, possible enhancement of drug absorption due to surfactant-induced alterations in membrane fluidity and permeability, ease of preparation, ease of oral administration over solid dosage forms, improved clinical potency, and decreased toxicity (see e.g., U.S. Pat. Nos. 6,191,105; 7,063,860; 7,070,802; 7,157,099; Constantinides et al., Pharmaceutical Research, 1994, 11, 1385; Ho et al., J. Pharm. Sci., 1996, 85, 138-143). Often microemulsions can form spontaneously when their components are brought together at ambient temperature. This can be particularly advantageous when formulating thermolabile drugs, peptides or antisense polynucleotide agents. Microemulsions have also been effective in the transdermal delivery of active components in both cosmetic and pharmaceutical applications. It is expected that the microemulsion compositions and formulations of the present invention will facilitate the increased systemic absorption of antisense polynucleotide agents from the gastrointestinal tract, as well as improve the local cellular uptake of antisense polynucleotide agents and nucleic acids.

[0374] Microemulsions of the present invention can also contain additional components and additives such as sorbitan monostearate (Grill 3), Labrasol, and penetration enhancers to improve the properties of the formulation and to enhance the absorption of the antisense polynucleotide agents of the present invention. Penetration enhancers used in the microemulsions of the present invention can be classified as belonging to one of five broad categories—surfactants, fatty acids, bile salts, chelating agents, and non-chelating non-surfactants (Lee et al., Critical Reviews in Therapeutic Drug Carrier Systems, 1991, p. 92). Each of these classes has been discussed above.

[0375] iii. Microparticles

[0376] An anti sense polynucleotide agent of the invention may be incorporated into a particle, e.g., a microparticle. Microparticles can be produced by spray-drying, but may also be produced by other methods including lyophilization, evaporation, fluid bed drying, vacuum drying, or a combination of these techniques.

[0377] iv. Penetration Enhancers

[0378] In one embodiment, the present invention employs various penetration enhancers to effect the efficient delivery of nucleic acids, particularly antisense polynucleotide agents, to the skin of animals. Most drugs are present in solution in both ionized and nonionized forms. However, usually only lipid soluble or lipophilic drugs readily cross cell membranes. It has been discovered that even non-lipophilic drugs can cross cell membranes if the membrane to be crossed is treated with a penetration enhancer. In addition to aiding the diffusion of non-lipophilic drugs across cell membranes, penetration enhancers also enhance the permeability of lipophilic drugs.

[0379] Penetration enhancers can be classified as belonging to one of five broad categories, i.e., surfactants, fatty acids, bile salts, chelating agents, and non-chelating non-surfactants (see e.g., Malmsten, M. Surfactants and polymers in drug delivery, Informa Health Care, New York, NY, 2002; Lee et al., Critical Reviews in Therapeutic Drug Carrier Systems, 1991, p.92). Each of the above mentioned classes of penetration enhancers are described below in greater detail.

[0380] Surfactants (or “surface-active agents”) are chemical entities which, when dissolved in an aqueous solution, reduce the surface tension of the solution or the interfacial tension between the aqueous solution and another liquid, with the result that absorption of antisense polynucleotide agents through the mucosa is enhanced. In addition to bile salts and fatty acids, these penetration enhancers include, for example, sodium lauryl sulfate, polyoxyethylene-9-lauryl ether and polyoxyethylene-20-cetyl ether) (see e.g., Malmsten, M. Surfactants and polymers in drug delivery, Informa Health Care, New York, NY, 2002; Lee et al., Critical Reviews in Therapeutic Drug Carrier Systems, 1991, p.92); and perfluorochemical emulsions, such as FC-43. Takahashi et al., J. Pharm. Pharmacol., 1988, 40, 252).

[0381] Various fatty acids and their derivatives which act as penetration enhancers include, for example, oleic acid, lauric acid, capric acid (n-decanoic acid), myristic acid, palmitic acid, stearic acid, linoleic acid, linolenic acid, dicaprate, tricaprate, monoolein (1-monooleoyl-rac-glycerol), dilaurin, caprylic acid, arachidonic acid, glycerol 1-monocaprate, 1-dodecylazacycloheptan-2-one, acylcarnitines, acylcholines, C₁₋₂₀ alkyl esters thereof (e.g., methyl, isopropyl and t-butyl), and mono- and di-glycerides thereof (i.e., oleate, laurate, caprate, myristate, palmitate, stearate, linoleate, etc.) (see e.g., Touitou, E., et al. Enhancement in Drug Delivery, CRC Press, Danvers, M A, 2006; Lee et al., Critical Reviews in Therapeutic Drug Carrier Systems, 1991, p.92; Muranishi, Critical Reviews in Therapeutic Drug Carrier Systems, 1990, 7, 1-33; El Hariri et al., J. Pharm. Pharmacol., 1992, 44, 651-654).

[0382] The physiological role of bile includes the facilitation of dispersion and absorption of lipids and fat-soluble vitamins (see e.g., Malmsten, M. Surfactants and polymers in drug delivery, Informa Health Care, New York, NY, 2002; Brunton, Chapter 38 in: Goodman & Gilman's The Pharmacological Basis of Therapeutics, 9th Ed., Hardman et al. Eds., McGraw-Hill, New York, 1996, pp. 934-935). Various natural bile salts, and their synthetic derivatives, act as penetration enhancers. Thus the term “bile salts” includes any of the naturally occurring components of bile as well as any of their synthetic derivatives. Suitable bile salts include, for example, cholic acid (or its pharmaceutically acceptable sodium salt, sodium cholate), dehydrocholic acid (sodium dehydrocholate), deoxycholic acid (sodium deoxycholate), glucholic acid (sodium glucholate), glycholic acid (sodium glycocholate), glycodeoxycholic acid (sodium glycodeoxycholate), taurocholic acid (sodium taurocholate), taurodeoxycholic acid (sodium taurodeoxycholate), chenodeoxycholic acid (sodium chenodeoxycholate), ursodeoxycholic acid (UDCA), sodium tauro-24,25-dihydro-fusidate (STDHF), sodium glycodihydrofusidate and polyoxyethylene-9-lauryl ether (POE) (see e.g., Malmsten, M. Surfactants and polymers in drug delivery, Informa Health Care, New York, NY, 2002; Lee et al., Critical Reviews in Therapeutic Drug Carrier Systems, 1991, page 92; Swinyard, Chapter 39 In: Remington's Pharmaceutical Sciences, 18th Ed., Gennaro, ed., Mack Publishing Co., Easton, Pa., 1990, pages 782-783; Muranishi, Critical Reviews in Therapeutic Drug Carrier Systems, 1990, 7, 1-33; Yamamoto et al., J. Pharm. Exp. Ther., 1992, 263, 25; Yamashita et al., J. Pharm. Sci., 1990, 79, 579-583).

[0383] Chelating agents, as used in connection with the present invention, can be defined as compounds that remove metallic ions from solution by forming complexes therewith, with the result that absorption of antisense polynucleotide agents through the mucosa is enhanced. With regards to their use as penetration enhancers in the present invention, chelating agents have the added advantage of also serving as DNase inhibitors, as most characterized DNA nucleases require a divalent metal ion for catalysis and are thus inhibited by chelating agents (Jarrett, J. Chromatogr., 1993, 618, 315-339). Suitable chelating agents include but are not limited to disodium ethylenediaminetetraacetate (EDTA), citric acid, salicylates (e.g., sodium salicylate, 5-methoxysalicylate and homovanilate), N-acyl derivatives of collagen, laureth-9 and N-amino acyl derivatives of beta-diketones (enamines)(see e.g., Katdare, A. et al., Excipient development for pharmaceutical, biotechnology, and drug delivery, CRC Press, Danvers, M A, 2006; Lee et al., Critical Reviews in Therapeutic Drug Carrier Systems, 1991, page 92; Muranishi, Critical Reviews in Therapeutic Drug Carrier Systems, 1990, 7, 1-33; Buur et al., J. Control Rel., 1990, 14, 43-51).

[0384] As used herein, non-chelating non-surfactant penetration enhancing compounds can be defined as compounds that demonstrate insignificant activity as chelating agents or as surfactants but that nonetheless enhance absorption of antisense polynucleotide agents through the alimentary mucosa (see e.g., Muranishi, Critical Reviews in Therapeutic Drug Carrier Systems, 1990, 7, 1-33). This class of penetration enhancers includes, for example, unsaturated cyclic ureas, 1-alkyl- and 1-alkenylazacyclo-alkanone derivatives (Lee et al., Critical Reviews in Therapeutic Drug Carrier Systems, 1991, page 92); and non-steroidal anti-inflammatory agents such as diclofenac sodium, indomethacin and phenylbutazone (Yamashita et al., J. Pharm. Pharmacol., 1987, 39, 621-626).

[0385] Agents that enhance uptake of antisense polynucleotide agents at the cellular level can also be added to the pharmaceutical and other compositions of the present invention. For example, cationic lipids, such as lipofectin (Junichi et al, U.S. Pat. No. 5,705,188), cationic glycerol derivatives, and polycationic molecules, such as polylysine (Lollo et al., PCT Application WO 97/30731), are also known to enhance the cellular uptake of antisense polynucleotide agents. Examples of commercially available transfection reagents include, for example Lipofectamine™ (Invitrogen; Carlsbad, CA), Lipofectamine 2000™ (Invitrogen; Carlsbad, CA), 293fectin™ (Invitrogen; Carlsbad, CA), Cellfectin™ (Invitrogen; Carlsbad, CA), DMRIE-C™ (Invitrogen; Carlsbad, CA), FreeStyle™ MAX (Invitrogen; Carlsbad, CA), Lipofectamine™ 2000 CD (Invitrogen; Carlsbad, CA), Lipofectamine™ (Invitrogen; Carlsbad, CA), RNAiMAX (Invitrogen; Carlsbad, CA), Oligofectamine™ (Invitrogen; Carlsbad, CA), Optifect™ (Invitrogen; Carlsbad, CA), X-tremeGENE Q2 Transfection Reagent (Roche; Grenzacherstrasse, Switzerland), DOTAP Liposomal Transfection Reagent (Grenzacherstrasse, Switzerland), DOSPER Liposomal Transfection Reagent (Grenzacherstrasse, Switzerland), or Fugene (Grenzacherstrasse, Switzerland), Transfectam® Reagent (Promega; Madison, WI), TransFast™ Transfection Reagent (Promega; Madison, WI), Tfx™-20 Reagent (Promega; Madison, WI), Tfx™-50 Reagent (Promega; Madison, WI), DreamFect™ (OZ Biosciences; Marseille, France), EcoTransfect (OZ Biosciences; Marseille, France), TransPass D1 Transfection Reagent (New England Biolabs; Ipswich, MA, USA), LyoVec™/LipoGen™ (Invitrogen; San Diego, CA, USA), PerFectin Transfection Reagent (Genlantis; San Diego, CA, USA), NeuroPORTER Transfection Reagent (Genlantis; San Diego, CA, USA), GenePORTER Transfection reagent (Genlantis; San Diego, CA, USA), GenePORTER 2 Transfection reagent (Genlantis; San Diego, CA, USA), Cytofectin Transfection Reagent (Genlantis; San Diego, CA, USA), BaculoPORTER Transfection Reagent (Genlantis; San Diego, CA, USA), TroganPORTER™ transfection Reagent (Genlantis; San Diego, CA, USA), RiboFect (Bioline; Taunton, MA, USA), PlasFect (Bioline; Taunton, MA, USA), UniFECTOR (B-Bridge International; Mountain View, CA, USA), SureFECTOR (B-Bridge International; Mountain View, CA, USA), or HiFect™ (B-Bridge International, Mountain View, CA, USA), among others.

[0386] Other agents can be utilized to enhance the penetration of the administered nucleic acids, including glycols such as ethylene glycol and propylene glycol, pyrrols such as 2-pyrrol, azones, and terpenes such as limonene and menthone.

[0387] v. Carriers

[0388] Certain compositions of the present invention also incorporate carrier compounds in the formulation. As used herein, “carrier compound” or “carrier” can refer to a nucleic acid, or analog thereof, which is inert (i.e., does not possess biological activity per se) but is recognized as a nucleic acid by in vivo processes that reduce the bioavailability of a nucleic acid having biological activity by, for example, degrading the biologically active nucleic acid or promoting its removal from circulation. The coadministration of a nucleic acid and a carrier compound, typically with an excess of the latter substance, can result in a substantial reduction of the amount of nucleic acid recovered in the liver, kidney or other extracirculatory reservoirs, presumably due to competition between the carrier compound and the nucleic acid for a common receptor. For example, the recovery of a partially phosphorothioated anti sense polynucleotide agent in hepatic tissue can be reduced when it is coadministered with polyinosinic acid, dextran sulfate, polycytidic acid or 4-acetamido-4′isothiocyano-stilbene-2,2′-disulfonic acid (Miyao et al., Antisense polynucleotide agent Res. Dev., 1995, 5, 115-121; Takakura et al., Antisense polynucleotide agent & Nucl. Acid Drug Dev., 1996, 6, 177-183.

[0389] vi. Excipients

[0390] In contrast to a carrier compound, a “pharmaceutical carrier” or “excipient” is a pharmaceutically acceptable solvent, suspending agent or any other pharmacologically inert vehicle for delivering one or more nucleic acids to an animal. The excipient can be liquid or solid and is selected, with the planned manner of administration in mind, so as to provide for the desired bulk, consistency, etc., when combined with a nucleic acid and the other components of a given pharmaceutical composition. Typical pharmaceutical carriers include, but are not limited to, binding agents (e.g., pregelatinized maize starch, polyvinylpyrrolidone or hydroxypropyl methylcellulose, etc.); fillers (e.g., lactose and other sugars, microcrystalline cellulose, pectin, gelatin, calcium sulfate, ethyl cellulose, polyacrylates or calcium hydrogen phosphate, etc.); lubricants (e.g., magnesium stearate, talc, silica, colloidal silicon dioxide, stearic acid, metallic stearates, hydrogenated vegetable oils, corn starch, polyethylene glycols, sodium benzoate, sodium acetate, etc.); disintegrants (e.g., starch, sodium starch glycolate, etc.); and wetting agents (e.g., sodium lauryl sulphate, etc).

[0391] Pharmaceutically acceptable organic or inorganic excipients suitable for non-parenteral administration which do not deleteriously react with nucleic acids can also be used to formulate the compositions of the present invention. Suitable pharmaceutically acceptable carriers include, but are not limited to, water, salt solutions, alcohols, polyethylene glycols, gelatin, lactose, amylose, magnesium stearate, talc, silicic acid, viscous paraffin, hydroxymethylcellulose, polyvinylpyrrolidone and the like.

[0392] Formulations for topical administration of nucleic acids can include sterile and non-sterile aqueous solutions, non-aqueous solutions in common solvents such as alcohols, or solutions of the nucleic acids in liquid or solid oil bases. The solutions can also contain buffers, diluents and other suitable additives. Pharmaceutically acceptable organic or inorganic excipients suitable for non-parenteral administration which do not deleteriously react with nucleic acids can be used.

[0393] Suitable pharmaceutically acceptable excipients include, but are not limited to, water, salt solutions, alcohol, polyethylene glycols, gelatin, lactose, amylose, magnesium stearate, talc, silicic acid, viscous paraffin, hydroxymethylcellulose, polyvinylpyrrolidone and the like.

[0394] vii. Other Components

[0395] The compositions of the present invention can additionally contain other adjunct components conventionally found in pharmaceutical compositions, at their art-established usage levels. Thus, for example, the compositions can contain additional, compatible, pharmaceutically-active materials such as, for example, antipruritics, astringents, local anesthetics or anti-inflammatory agents, or can contain additional materials useful in physically formulating various dosage forms of the compositions of the present invention, such as dyes, flavoring agents, preservatives, antioxidants, opacifiers, thickening agents and stabilizers. However, such materials, when added, should not unduly interfere with the biological activities of the components of the compositions of the present invention. The formulations can be sterilized and, if desired, mixed with auxiliary agents, e.g., lubricants, preservatives, stabilizers, wetting agents, emulsifiers, salts for influencing osmotic pressure, buffers, colorings, flavorings or aromatic substances and the like which do not deleteriously interact with the nucleic acid(s) of the formulation.

[0396] Aqueous suspensions can contain substances which increase the viscosity of the suspension including, for example, sodium carboxymethylcellulose, sorbitol or dextran. The suspension can also contain stabilizers.

[0397] In some embodiments, pharmaceutical compositions featured in the invention include (a) one or more antisense polynucleotide agents and (b) one or more agents which function by a non-antisense inhibition mechanism and which are useful in treating a hemolytic disorder. Examples of such agents include, but are not limited to an anti-inflammatory agent, anti-steatosis agent, anti-viral, or anti-fibrosis agent. In addition, other substances commonly used to protect the liver, such as silymarin, can also be used in conjunction with the antisense polynucleotide agents described herein. Other agents useful for treating liver diseases include telbivudine, entecavir, and protease inhibitors such as telaprevir and other disclosed, for example, in Tung et al., U.S. Application Publication Nos. 2005/0148548, 2004/0167116, and 2003/0144217; and in Hale et al., U.S. Application Publication No. 2004/0127488.

[0398] Toxicity and therapeutic efficacy of such compounds can be determined by standard pharmaceutical procedures in cell cultures or experimental animals, e.g., for determining the LD₅₀ (the dose lethal to 50% of the population) and the ED₅₀ (the dose therapeutically effective in 50% of the population). The dose ratio between toxic and therapeutic effects is the therapeutic index and it can be expressed as the ratio LD₅₀/ED₅₀. Compounds that exhibit high therapeutic indices are preferred.

[0399] The data obtained from cell culture assays and animal studies can be used in formulating a range of dosage for use in humans. The dosage of compositions featured herein in the invention lies generally within a range of circulating concentrations that include the ED₅₀ with little or no toxicity. The dosage can vary within this range depending upon the dosage form employed and the route of administration utilized. For any compound used in the methods featured in the invention, the therapeutically effective dose can be estimated initially from cell culture assays. A dose can be formulated in animal models to achieve a circulating plasma concentration range of the compound or, when appropriate, of the polypeptide product of a target sequence (e.g., achieving a decreased concentration of the polypeptide) that includes the IC₅₀ (i.e., the concentration of the test compound which achieves a half-maximal inhibition of symptoms) as determined in cell culture. Such information can be used to more accurately determine useful doses in humans. Levels in plasma can be measured, for example, by high performance liquid chromatography.

[0400] In addition to their administration, as discussed above, the antisense polynucleotide agents featured in the invention can be administered in combination with other known agents effective in treatment of pathological processes mediated by PD-L1 expression. In any event, the administering physician can adjust the amount and timing of antisense polynucleotide agent administration on the basis of results observed using standard measures of efficacy known in the art or described herein.

### VII. Methods For Inhibiting PD-L1 Expression

[0401] The present invention provides methods of inhibiting expression of PD-L1 in a cell. The methods include contacting a cell with an antisense polynucleotide agent of the invention in an amount effective to inhibit expression of the PD-L1 in the cell, thereby inhibiting expression of the PD-L1 in the cell.

[0402] Contacting of a cell with an antisense polynucleotide agent may be done in vitro or in vivo. Contacting a cell in vivo with the antisense polynucleotide agent includes contacting a cell or group of cells within a subject, e.g., a human subject, with the antisense polynucleotide agent. Combinations of in vitro and in vivo methods of contacting are also possible. Contacting may be direct or indirect, as discussed above. Furthermore, contacting a cell may be accomplished via a targeting ligand, including any ligand described herein or known in the art. In preferred embodiments, the targeting ligand is a carbohydrate moiety, e.g., a GalNAc 3 ligand, or any other ligand that directs the antisense polynucleotide agent to a site of interest, e.g., the liver of a subject.

[0403] The term “inhibiting,” as used herein, is used interchangeably with “reducing,” “silencing,” “downregulating” and other similar terms, and includes any level of inhibition.

[0404] The phrase “inhibiting expression of a PD-L1” is intended to refer to inhibition of expression of any PD-L1 gene (such as, e.g., a mouse PD-L1 gene, a rat PD-L1 gene, a monkey PD-L1 gene, or a human PD-L1 gene) as well as variants or mutants of a PD-L1 gene. Thus, the PD-L1 gene may be a wild-type PD-L1 gene, a mutant PD-L1 gene, or a transgenic PD-L1 gene in the context of a genetically manipulated cell, group of cells, or organism.

[0405] “Inhibiting expression of a PD-L1 gene” includes any level of inhibition of a PD-L1 gene, e.g., at least partial suppression of the expression of a PD-L1 gene. The expression of the PD-L1 gene may be assessed based on the level, or the change in the level, of any variable associated with PD-L1 gene expression, e.g., PD-L1 mRNA level or PD-L1 protein level. This level may be assessed in an individual cell or in a group of cells, including, for example, a sample derived from a subject. It is understood that expression of PD-L1 may be near or below the level of detection in a normal subject in many cell types and body fluids. Therefore, the inhibition of expression of PD-L1 for example, can compare the level of PD-L1 in the liver of a subject infected with a hepatitis virus prior to and after treatment with an agent for the inhibition of PD-L1 or in a tumor before or after treatment with an agent for inhibition of PD-L1.

[0406] In certain embodiments, surrogate markers can be used to detect inhibition of PD-L1. For example, effective treatment of an infection, e.g., a hepatitis virus infection as demonstrated by acceptable diagnostic and monitoring criteria with an agent to reduce PD-L1 expression can be understood to demonstrate a clinically relevant reduction in PD-L1. Stabilization or reduction of tumor burden in a subject with cancer as determined by RECIST criteria after treatment with an agent to reduce PD-L1 can be understood to demonstrate a clinically relevant reduction in PD-L1.

[0407] Inhibition may be assessed by a decrease in an absolute or relative level of one or more variables that are associated with PD-L1 expression compared with a control level. The control level may be any type of control level that is utilized in the art, e.g., a pre-dose baseline level, or a level determined from a similar subject, cell, or sample that is untreated or treated with a control (such as, e.g., buffer only control or inactive agent control).

[0408] In some embodiments of the methods of the invention, expression of a PD-L1 gene is inhibited by at least about 5%, at least about 10%, at least about 15%, at least about 20%, at least about 25%, at least about 30%, at least about 35%, at least about 40%, at least about 45%, at least about 50%, at least about 55%, at least about 60%, at least about 65%, at least about 70%, at least about 75%, at least about 80%, at least about 85%, at least about 90%, at least about 91%, at least about 92%, at least about 93%, at least about 94%. at least about 95%, at least about 96%, at least about 97%, at least about 98%, or at least about 99%. Preferably expression is inhibited by at least about 20%.

[0409] In preferred embodiments, the level of expression is detected using the in vitro method provided in the Examples.

[0410] Inhibition of the expression of a PD-L1 gene may be manifested by a reduction of the amount of mRNA expressed by a first cell or group of cells (such cells may be present, for example, in a sample derived from a subject) in which a PD-L1 gene is transcribed and which has or have been treated (e.g., by contacting the cell or cells with an antisense polynucleotide agent of the invention, or by administering an antisense polynucleotide agent of the invention to a subject in which the cells are or were present) such that the expression of a PD-L1 gene is inhibited, as compared to a second cell or group of cells substantially identical to the first cell or group of cells but which has not or have not been so treated (control cell(s)). In preferred embodiments, the inhibition is assessed by expressing the level of mRNA in treated cells as a percentage of the level of mRNA in control cells, using the following formula:

$$\frac{( m R N A in control cells ) - ( m R N A in treated cells )}{( m R N A in control cells )} \cdot 100 \%$$

[0411] Alternatively, inhibition of the expression of a PD-L1 gene may be assessed in terms of a reduction of a parameter that is functionally linked to PD-L1 gene expression, e.g., PD-L1 protein expression. In certain embodiments, surrogate markers can be used to detect inhibition of PD-L1. For example, effective treatment of an infection, e.g., a hepatitis virus infection as demonstrated by acceptable diagnostic and monitoring criteria with an agent to reduce PD-L1 expression can be understood to demonstrate a clinically relevant reduction in PD-L1. Stabilization or reduction of tumor burden in a subject with cancer as determined by RECIST criteria after treatment with an agent to reduce PD-L1 can be understood to demonstrate a clinically relevant reduction in PD-L1.

[0412] PD-L1 gene silencing may be determined in any cell expressing PD-L1, either constitutively or by genetic engineering, and by any assay known in the art. The liver is a major site of PD-L1 expression. Other significant sites of expression include immune cells. Inhibition of the expression of a PD-L1 protein may be manifested by a reduction in the level of the PD-L1 protein that is expressed by a cell or group of cells (e.g., the level of protein expressed in a sample derived from a subject). As explained above for the assessment of mRNA suppression, the inhibition of protein expression levels in a treated cell or group of cells may similarly be expressed as a percentage of the level of protein in a control cell or group of cells.

[0413] A control cell or group of cells that may be used to assess the inhibition of the expression of a PD-L1 gene includes a cell or group of cells that has not yet been contacted with an antisense polynucleotide agent of the invention. For example, the control cell or group of cells may be derived from an individual subject (e.g., a human or animal subject) prior to treatment of the subject with an antisense polynucleotide agent.

[0414] The level of PD-L1 mRNA that is expressed by a cell or group of cells may be determined using any method known in the art for assessing mRNA expression. In one embodiment, the level of expression of PD-L1 in a sample is determined by detecting a transcribed polynucleotide, or portion thereof, e.g., mRNA of the PD-L1 gene. RNA may be extracted from cells using RNA extraction techniques including, for example, using acid phenol/guanidine isothiocyanate extraction (RNAzol B; Biogenesis), RNeasy RNA preparation kits (Qiagen) or PAXgene (PreAnalytix, Switzerland). Typical assay formats utilizing ribonucleic acid hybridization include nuclear run-on assays, RT-PCR, RNase protection assays (Melton et al., Nuc. Acids Res. 12:7035), northern blotting, in situ hybridization, and microarray analysis.

[0415] In one embodiment, the level of expression of PD-L1 is determined using a nucleic acid probe. The term “probe”, as used herein, refers to any molecule that is capable of selectively binding to a specific PD-L1. Probes can be synthesized by one of skill in the art, or derived from appropriate biological preparations. Probes may be specifically designed to be labeled. Examples of molecules that can be utilized as probes include, but are not limited to, RNA, DNA, proteins, antibodies, and organic molecules.

[0416] Isolated mRNA can be used in hybridization or amplification assays that include, but are not limited to, Southern or northern analyses, polymerase chain reaction (PCR) analyses and probe arrays. One method for the determination of mRNA levels involves contacting the isolated mRNA with a nucleic acid molecule (probe) that can hybridize to PD-L1 mRNA. In one embodiment, the mRNA is immobilized on a solid surface and contacted with a probe, for example by running the isolated mRNA on an agarose gel and transferring the mRNA from the gel to a membrane, such as nitrocellulose. In an alternative embodiment, the probe(s) are immobilized on a solid surface and the mRNA is contacted with the probe(s), for example, in an Affymetrix® gene chip array. A skilled artisan can readily adapt known mRNA detection methods for use in determining the level of PD-L1 mRNA.

[0417] An alternative method for determining the level of expression of PD-L1 in a sample involves the process of nucleic acid amplification or reverse transcriptase (to prepare cDNA) of for example mRNA in the sample, e.g., by RT-PCR (the experimental embodiment set forth in Mullis, 1987, U.S. Pat. No. 4,683,202), ligase chain reaction (Barany (1991) Proc. Natl. Acad. Sci. USA 88:189-193), self sustained sequence replication (Guatelli et al. (1990) Proc. Natl. Acad. Sci. USA 87:1874-1878), transcriptional amplification system (Kwoh et al. (1989) Proc. Natl. Acad. Sci. USA 86:1173-1177), Q-Beta Replicase (Lizardi et al. (1988) Bio/Technology 6:1197), rolling circle replication (Lizardi et al., U.S. Pat. No. 5,854,033) or any other nucleic acid amplification method, followed by the detection of the amplified molecules using techniques well known to those of skill in the art. These detection schemes are especially useful for the detection of nucleic acid molecules if such molecules are present in very low numbers. In particular aspects of the invention, the level of expression of PD-L1 is determined by quantitative fluorogenic RT-PCR (i.e., the TaqMan™ System).

[0418] The expression levels of PD-L1 mRNA may be monitored using a membrane blot (such as used in hybridization analysis such as northern, Southern, dot, and the like), or microwells, sample tubes, gels, beads or fibers (or any solid support comprising bound nucleic acids). See U.S. Pat. Nos. 5,770,722, 5,874,219, 5,744,305, 5,677,195 and 5,445,934, which are incorporated herein by reference. The determination of PD-L1 expression level may also comprise using nucleic acid probes in solution.

[0419] In preferred embodiments, the level of mRNA expression is assessed using branched DNA (bDNA) assays or real time PCR (qPCR). The use of a qPCR methods is described and exemplified in the Examples presented herein.

[0420] The level of PD-L1 protein expression may be determined using any method known in the art for the measurement of protein levels. Such methods include, for example, electrophoresis, capillary electrophoresis, high performance liquid chromatography (HPLC), thin layer chromatography (TLC), hyperdiffusion chromatography, fluid or gel precipitin reactions, absorption spectroscopy, a colorimetric assays, spectrophotometric assays, flow cytometry, immunodiffusion (single or double), immunoelectrophoresis, western blotting, radioimmunoassay (MA), enzyme-linked immunosorbent assays (ELISAs), immunofluorescent assays, electrochemiluminescence assays, and the like.

[0421] The term “sample” as used herein refers to a collection of similar fluids, cells, or tissues isolated from a subject, as well as fluids, cells, or tissues present within a subject. Examples of biological fluids include blood, serum and serosal fluids, plasma, lymph, urine, cerebrospinal fluid, saliva, ocular fluids, and the like. Tissue samples may include samples from tissues, organs or localized regions. For example, samples may be derived from particular organs, parts of organs, or fluids or cells within those organs. In certain embodiments, samples may be derived from the liver (e.g., whole liver or certain segments of liver or certain types of cells in the liver, such as, e.g., hepatocytes). In preferred embodiments, a “sample derived from a subject” refers to blood or plasma drawn from the subject. In further embodiments, a “sample derived from a subject” refers to liver tissue derived from the subject.

[0422] In some embodiments of the methods of the invention, the antisense polynucleotide agent is administered to a subject such that the antisense polynucleotide agent is delivered to a specific site within the subject. The inhibition of expression of PD-L1 may be assessed using measurements of the level or change in the level of PD-L1 mRNA or PD-L1 protein in a sample derived from fluid or tissue from the specific site within the subject. In preferred embodiments, the site is the liver. The site may also be a subsection or subgroup of cells from any one of the aforementioned sites. The site may also include cells that express a particular type of receptor.

[0423] The phrase “contacting a cell with an antisense polynucleotide agent,” as used herein, includes contacting a cell by any possible means. Contacting a cell with an antisense polynucleotide agent includes contacting a cell in vitro with the antisense polynucleotide agent or contacting a cell in vivo with the antisense polynucleotide agent. The contacting may be done directly or indirectly. Thus, for example, the antisense polynucleotide agent may be put into physical contact with the cell by the individual performing the method, or alternatively, the antisense polynucleotide agent may be put into a situation that will permit or cause it to subsequently come into contact with the cell.

[0424] Contacting a cell in vitro may be done, for example, by incubating the cell with the antisense polynucleotide agent. Contacting a cell in vivo may be done, for example, by injecting the antisense polynucleotide agent into or near the tissue where the cell is located, or by injecting the anti sense polynucleotide agent into another area, e.g., the bloodstream or the subcutaneous space, such that the agent will subsequently reach the tissue where the cell to be contacted is located. For example, the antisense polynucleotide agent may contain or be coupled to a ligand, e.g., GalNAc3, that directs the antisense polynucleotide agent to a site of interest, e.g., the liver. Combinations of in vitro and in vivo methods of contacting are also possible. For example, a cell may also be contacted in vitro with an antisense polynucleotide agent and subsequently transplanted into a subject.

[0425] In one embodiment, contacting a cell with an antisense polynucleotide agent includes “introducing” or “delivering the antisense polynucleotide agent into the cell” by facilitating or effecting uptake or absorption into the cell. Absorption or uptake of an antisense polynucleotide agent can occur through unaided diffusive or active cellular processes, or by auxiliary agents or devices. Introducing an antisense polynucleotide agent into a cell may be in vitro or in vivo. For example, for in vivo introduction, antisense polynucleotide agent can be injected into a tissue site or administered systemically. In vivo delivery can also be done by a beta-glucan delivery system, such as those described in U.S. Pat. Nos. 5,032,401 and 5,607,677, and U.S. Publication No. 2005/0281781, the entire contents of which are hereby incorporated herein by reference. In vitro introduction into a cell includes methods known in the art such as electroporation and lipofection. Further approaches are described herein below or are known in the art.

### VIII. Methods for Treating a Programmed Cell Death 1 Ligand 1-Associated Disorder

[0426] The present invention also provides therapeutic and prophylactic methods which include administering to a subject having a PD-L1-associated disease, e.g., an infectious disease, such as a chronic intracellular infectious disease, e.g., a viral disease, e.g., hepatitis infection, or a bacterial infection, e.g., tuberculosis infection; and cancer, e.g., a hepatic cancer, e.g., hepatocellular carcinoma, an antisense polynucleotide agent or pharmaceutical compositions comprising an antisense polynucleotide agent of the invention.

[0427] In one aspect, the present invention provides methods of treating a subject having a disorder that would benefit from reduction in PD-L1 expression, e.g., a Programmed cell death 1 ligand 1-associated disease, e.g., an infectious disease, such as a chronic intracellular infectious disease, e.g., a viral disease, e.g., hepatitis infection, or a bacterial infection, e.g., tuberculosis infection; and cancer, e.g., a hepatic cancer, e.g., hepatocellular carcinoma. The treatment methods (and uses) of the invention include administering to the subject, e.g., a human, a therapeutically effective amount of an antisense polynucleotide agent targeting a PD-L1 gene or a pharmaceutical composition comprising an antisense polynucleotide agent targeting a PD-L1 gene, thereby treating the subject having a disorder that would benefit from reduction in PD-L1 expression.

[0428] In another aspect, the present invention provides methods of treating a subject having a disorder that would benefit from reduction in PD-L1 expression, e.g., a PD-L1-associated disease, e.g., an infectious disease, such as a chronic intracellular infectious disease, e.g., a viral disease, e.g., hepatitis infection, or a bacterial infection, e.g., tuberculosis infection; and cancer, e.g., a hepatic cancer, e.g., hepatocellular carcinoma, which include administering to the subject, e.g., a human, a therapeutically effective amount of an antisense polynucleotide agent targeting a PD-L1 gene or a pharmaceutical composition comprising an antisense polynucleotide agent targeting a PD-L1 gene, and an additional therapeutic agent selected depending on the disease to be treated, e.g., for the treatment of an infection, for example, an HBV infection, or cancer, thereby treating the subject having a disorder that would benefit from reduction in PD-L1 expression.

[0429] “Therapeutically effective amount,” as used herein, is intended to include the amount of an anti sense polynucleotide agent, that, when administered to a subject having a PD-L1-associated disease, is sufficient to effect treatment of the disease (e.g., by diminishing or maintaining the existing disease or one or more symptoms of disease). The “therapeutically effective amount” may vary depending on the antisense polynucleotide agent, how the agent is administered, the disease and its severity and the history, age, weight, family history, genetic makeup, the types of preceding or concomitant treatments, if any, and other individual characteristics of the subject to be treated.

[0430] A “therapeutically effective amount” also includes an amount of an antisense polynucleotide agent that produces some desired local or systemic effect at a reasonable benefit/risk ratio applicable to any treatment. Antisense polynucleotide agents employed in the methods of the present invention may be administered in a sufficient amount to produce a reasonable benefit/risk ratio applicable to such treatment.

[0431] In another aspect, the present invention provides uses of a therapeutically effective amount of an antisense polynucleotide agent of the invention for treating a subject, e.g., a subject that would benefit from a reduction or inhibition of PD-L1 expression.

[0432] In another aspect, the present invention provides uses of a therapeutically effective amount of an antisense polynucleotide agent of the invention and an additional therapeutic agent selected depending on the disease to be treated, e.g., for the treatment of an infection, for example, an HBV infection, or cancer, for treating a subject, e.g., a subject that would benefit from a reduction or inhibition of PD-L1 expression.

[0433] In yet another aspect, the present invention provides use of an antisense polynucleotide agent of the invention targeting a PD-L1 gene or a pharmaceutical composition comprising an antisense polynucleotide agent targeting a PD-L1 gene in the manufacture of a medicament for treating a subject, e.g., a subject that would benefit from a reduction or inhibition of PD-L1 expression, such as a subject having a disorder that would benefit from reduction in PD-L1 expression, e.g., a PD-L1-associated disease, e.g., an infectious disease, such as a chronic intracellular infectious disease, e.g., a viral disease, e.g., hepatitis infection, or a bacterial infection, e.g., tuberculosis infection; and cancer, e.g., a hepatic cancer, e.g., hepatocellular carcinoma.

[0434] In another aspect, the present invention provides uses of an antisense polynucleotide agent of the invention targeting a PD-L1 gene or a pharmaceutical composition comprising an anti sense polynucleotide agent targeting a PD-L1 gene in the manufacture of a medicament for use in combination with an additional therapeutic agent, such as selected depending on the disease to be treated, e.g., for the treatment of an infection, for example, an HBV infection, or cancer, for treating a subject, e.g., a subject that would benefit from a reduction or inhibition of PD-L1 expression, e.g., a PD-L1-associated disease, e.g., an infectious disease, such as a chronic intracellular infectious disease, e.g., a viral disease, e.g., hepatitis infection, or a bacterial infection, e.g., tuberculosis infection; and cancer, e.g., a hepatic cancer, e.g., hepatocellular carcinoma.

[0435] Efficacy of treatment of an infectious disease can be demonstrated, for example, by a decrease in the presence of the infectious agent as demonstrated by an inability to culture the agent from a subject sample. Efficacy of treatment of an infectious disease can be demonstrated by a decrease in the presence of the infectious agent as demonstrated, for example, by a decrease in a protein, nucleic acid, or carbohydrate present in the infectious agent. Efficacy of treatment can be demonstrated, for example, by the presence of an immune response as demonstrated by the presence of antibodies or immune cells targeted against the infectious agent. Efficacy of treatment of an infectious disease can be demonstrated by a decrease in the presence of the infectious agent as demonstrated, for example, by a decrease in one or more signs or symptoms of the infection, e.g., fever, pain, nausea, vomiting, abnormal blood chemistry, weight loss. The specific signs or symptoms will depend on the specific pathogen. Efficacy of treatment of an infectious disease can be demonstrated by the development of antibodies or immune cells targeting the pathogen.

[0436] Efficacy of treatment of cancer can be demonstrated by stabilization or a decrease in tumor burden as demonstrated by a stabilization or decrease in tumor burden of the primary tumor, metastatic tumors, or the delay or prevention of tumor metastasis. Diagnostic and monitoring methods are provided herein, e.g., RECIST criteria.

[0437] Comparisons of the later readings with the initial readings provide a physician an indication of whether the treatment is effective. It is well within the ability of one skilled in the art to monitor efficacy of treatment or prevention by measuring any one of such parameters, or any combination of parameters. In connection with the administration of an iRNA targeting PD-L1 or pharmaceutical composition thereof, “effective against” a PD-L1 related disorder indicates that administration in a clinically appropriate manner results in a beneficial effect for at least a statistically significant fraction of patients, such as a improvement of symptoms, a cure, a reduction in disease, extension of life, improvement in quality of life, or other effect generally recognized as positive by medical doctors familiar with treating PD-L1-related disorders as provided, for example, in the diagnostic criteria for HBV provided herein.

[0438] A treatment or preventive effect is evident when there is a statistically significant improvement in one or more parameters of disease status, or by a failure to worsen or to develop symptoms where they would otherwise be anticipated. As an example, a favorable change of at least 10% in a measurable parameter of disease, and preferably at least 20%, 30%, 40%, 50% or more can be indicative of effective treatment. Efficacy for a given iRNA drug or formulation of that drug can also be judged using an experimental animal model for the given disease as known in the art. When using an experimental animal model, efficacy of treatment is evidenced when a statistically significant reduction in a marker or symptom is observed.

[0439] Alternatively, the efficacy can be measured by a reduction in the severity of disease as determined by one skilled in the art of diagnosis based on a clinically accepted disease severity grading scale. Any positive change resulting in e.g., lessening of severity of disease measured using the appropriate scale, represents adequate treatment using an iRNA or iRNA formulation as described herein.

[0440] In a further aspect, the present invention provides uses of an antisense polynucleotide agent of the invention in the manufacture of a medicament for preventing at least one symptom in a subject suffering from a disorder that would benefit from a reduction or inhibition of PD-L1 expression, such as a a PD-L1-associated disease.

[0441] The additional therapeutic may be selected based on the disease or condition to be treated.

[0442] The methods of the invention comprising administration of an antisense polynucleotide agent of the invention and an additional agent selected depending on the disease to be treated, e.g., for the treatment of an infection, for example, an HBV infection, or cancer to a subject is included within the scope of the invention.

[0443] The additional therapeutic agents appropriate to the disease or condition to be treated, may be administered to the subject at the same time as the antisense polynucleotide agent targeting PD-L1or at a different time.

[0444] Moreover, the additional therapeutic agent may be administered to the subject in the same formulation as the antisense polynucleotide agent targeting PD-L1or in a different formulation as the antisense polynucleotide agent targeting PD-L1.

[0445] The methods and uses of the invention include administering a composition described herein such that expression of the target PD-L1 gene is decreased, such as for at least about 1, 2, 3, 4, 5, 6, 7, 8, 12, 16, 18, 24, 28, 32, 36, 40, 44, 48, 52, 56, 60, 64, 68, 72, 76, or 80 hours. In one embodiment, expression of the target PD-L1gene is decreased for an extended duration, e.g., at least two, three, four, five, six, seven days or more, e.g., one week, two weeks, three weeks, or four weeks, or longer.

[0446] Administration of the antisense polynucleotide agent according to the methods and uses of the invention may result in a reduction of the severity, signs, symptoms, or markers of such diseases or disorders in a patient with a PD-L1-associated disease. By “reduction” in this context is meant a statistically significant decrease in such level as compared to an appropriate control. The reduction can be, for example, at least 20%, 25%, 30%, 35%, 40%, 45%, 50%, 55%, 60%, 65%, 70%, 75%, 80%, 85%, 90%, 95%, or to below the level of detection of the assay used for detection. In certain embodiments, the reduction is the normalization of the level of a sign or symptom of a disease, a reduction in the difference between the subject level of a sign of the disease and the normal level of the sign for the disease (e.g., upper level of normal, lower level of normal, average of upper and lower level of normal). For example, reduction can be understood as normalization of blood pressure, decreasing an elevated blood pressure or increasing a low blood pressure to reduce the difference from a normal reading.

[0447] Efficacy of treatment of disease can be assessed, for example by measuring disease progression, disease remission, symptom severity, dose of a medication required to sustain a treatment effect, level of a disease marker or any other measurable parameter appropriate for a given disease being treated or targeted for prevention. It is well within the ability of one skilled in the art to monitor efficacy of treatment or prevention by measuring any one of such parameters, or any combination of parameters. For example, efficacy of treatment of a PD-L1 associated condition as discussed below. Comparisons of the later readings with the initial readings provide a physician an indication of whether the treatment is effective. It is well within the ability of one skilled in the art to monitor efficacy of treatment or prevention by measuring any one of such parameters, or any combination of parameters. In connection with the administration of an antisense polynucleotide agent targeting PD-L1or pharmaceutical composition thereof, “effective against” a PD-L1-associated disease indicates that administration in a clinically appropriate manner results in a beneficial effect for at least a statistically significant fraction of patients, such as improvement of symptoms, a cure, a reduction in disease, extension of life, or other effect generally recognized as positive by medical doctors familiar with treating a PD-L1-associated disease and the related causes.

[0448] Alternatively, the efficacy can be measured by a reduction in the severity of disease as determined by one skilled in the art of diagnosis based on a clinically accepted criteria as discussed below. Any positive change resulting in e.g., lessening of severity of disease measured using the appropriate scale, represents adequate treatment using an antisense polynucleotide agent or antisense polynucleotide agent formulation as described herein.

[0449] Subjects can be administered a therapeutic amount of antisense polynucleotide agent, such as about 0.01 mg/kg, 0.05 mg/kg, 0.1 mg/kg, 0.15 mg/kg, 0.2 mg/kg, 0.25 mg/kg, 0.3 mg/kg, 0.35 mg/kg, 0.4 mg/kg, 0.45 mg/kg, 0.5 mg/kg, 0.55 mg/kg, 0.6 mg/kg, 0.65 mg/kg, 0.7 mg/kg, 0.75 mg/kg, 0.8 mg/kg, 0.85 mg/kg, 0.9 mg/kg, 0.95 mg/kg, 1.0 mg/kg, 1.1 mg/kg, 1.2 mg/kg, 1.3 mg/kg, 1.4 mg/kg, 1.5 mg/kg, 1.6 mg/kg, 1.7 mg/kg, 1.8 mg/kg, 1.9 mg/kg, 2.0 mg/kg, 2.1 mg/kg, 2.2 mg/kg, 2.3 mg/kg, 2.4 mg/kg, 2.5 mg/kg, 2.6 mg/kg, 2.7 mg/kg, 2.8 mg/kg, 2.9 mg/kg, 3.0 mg/kg, 3.1 mg/kg, 3.2 mg/kg, 3.3 mg/kg, 3.4 mg/kg, 3.5 mg/kg, 3.6 mg/kg, 3.7 mg/kg, 3.8 mg/kg, 3.9 mg/kg, 4.0 mg/kg, 4.1 mg/kg, 4.2 mg/kg, 4.3 mg/kg, 4.4 mg/kg, 4.5 mg/kg, 4.6 mg/kg, 4.7 mg/kg, 4.8 mg/kg, 4.9 mg/kg, 5.0 mg/kg, 5.1 mg/kg, 5.2 mg/kg, 5.3 mg/kg, 5.4 mg/kg, 5.5 mg/kg, 5.6 mg/kg, 5.7 mg/kg, 5.8 mg/kg, 5.9 mg/kg, 6.0 mg/kg, 6.1 mg/kg, 6.2 mg/kg, 6.3 mg/kg, 6.4 mg/kg, 6.5 mg/kg, 6.6 mg/kg, 6.7 mg/kg, 6.8 mg/kg, 6.9 mg/kg, 7.0 mg/kg, 7.1 mg/kg, 7.2 mg/kg, 7.3 mg/kg, 7.4 mg/kg, 7.5 mg/kg, 7.6 mg/kg, 7.7 mg/kg, 7.8 mg/kg, 7.9 mg/kg, 8.0 mg/kg, 8.1 mg/kg, 8.2 mg/kg, 8.3 mg/kg, 8.4 mg/kg, 8.5 mg/kg, 8.6 mg/kg, 8.7 mg/kg, 8.8 mg/kg, 8.9 mg/kg, 9.0 mg/kg, 9.1 mg/kg, 9.2 mg/kg, 9.3 mg/kg, 9.4 mg/kg, 9.5 mg/kg, 9.6 mg/kg, 9.7 mg/kg, 9.8 mg/kg, 9.9 mg/kg, 9.0 mg/kg, 10 mg/kg, 15 mg/kg, 20 mg/kg, 25 mg/kg, 30 mg/kg, 35 mg/kg, 40 mg/kg, 45 mg/kg, or 50 mg/kg. Values and ranges intermediate to the recited values are also intended to be part of this invention.

[0450] In certain embodiments, for example, when a composition of the invention comprises a antisense polynucleotide agent as described herein and a lipid, subjects can be administered a therapeutic amount of antisense polynucleotide agent, such as about 0.01 mg/kg to 5 mg/kg, 0.01 mg/kg to 10 mg/kg, 0.05 mg/kg to 5 mg/kg, 0.05 mg/kg to 10 mg/kg, 0.1 mg/kg to 5 mg/kg, 0.1 mg/kg to 10 mg/kg, 0.2 mg/kg to 5 mg/kg, 0.2 mg/kg to 10 mg/kg, 0.3 mg/kg to 5 mg/kg, 0.3 mg/kg to 10 mg/kg, 0.4 mg/kg to 5 mg/kg, 0.4 mg/kg to 10 mg/kg, 0.5 mg/kg to 5 mg/kg, 0.5 mg/kg to 10 mg/kg, 1 mg/kg to 5 mg/kg, 1 mg/kg to 10 mg/kg, 1.5 mg/kg to 5 mg/kg, 1.5 mg/kg to 10 mg/kg, 2 mg/kg to 2.5 mg/kg, 2 mg/kg to 10 mg/kg, 3 mg/kg to 5 mg/kg, 3 mg/kg to 10 mg/kg, 3.5 mg/kg to 5 mg/kg, 4 mg/kg to 5 mg/kg, 4.5 mg/kg to 5 mg/kg, 4 mg/kg to 10 mg/kg, 4.5 mg/kg to 10 mg/kg, 5 mg/kg to 10 mg/kg, 5.5 mg/kg to 10 mg/kg, 6 mg/kg to 10 mg/kg, 6.5 mg/kg to 10 mg/kg, 7 mg/kg to 10 mg/kg, 7.5 mg/kg to 10 mg/kg, 8 mg/kg to 10 mg/kg, 8.5 mg/kg to 10 mg/kg, 9 mg/kg to 10 mg/kg, or 9.5 mg/kg to 10 mg/kg. Values and ranges intermediate to the recited values are also intended to be part of this invention.

[0451] For example, the antisense polynucleotide agent may be administered at a dose of about 0.1, 0.2, 0.3, 0.4, 0.5, 0.6, 0.7, 0.8, 0.9, 1, 1.1, 1.2, 1.3, 1.4, 1.5, 1.6, 1.7, 1.8, 1.9, 2, 2.1, 2.2, 2.3, 2.4, 2.5, 2.6, 2.7, 2.8, 2.9, 3, 3.1, 3.2, 3.3, 3.4, 3.5, 3.6, 3.7, 3.8, 3.9, 4, 4.1, 4.2, 4.3, 4.4, 4.5, 4.6, 4.7, 4.8, 4.9, 5, 5.1, 5.2, 5.3, 5.4, 5.5, 5.6, 5.7, 5.8, 5.9, 6, 6.1, 6.2, 6.3, 6.4, 6.5, 6.6, 6.7, 6.8, 6.9, 7, 7.1, 7.2, 7.3, 7.4, 7.5, 7.6, 7.7, 7.8, 7.9, 8, 8.1, 8.2, 8.3, 8.4, 8.5, 8.6, 8.7, 8.8, 8.9, 9, 9.1, 9.2, 9.3, 9.4, 9.5, 9.6, 9.7, 9.8, 9.9, or about 10 mg/kg. Values and ranges intermediate to the recited values are also intended to be part of this invention.

[0452] In other embodiments, for example, when a composition of the invention comprises a antisense polynucleotide agent as described herein and an N-acetylgalactosamine, subjects can be administered a therapeutic amount of antisense polynucleotide agent, such as a dose of about 0.1 to 50 mg/kg, 0.25 to 50 mg/kg, 0.5 to 50 mg/kg, 0.75 to 50 mg/kg, 1 to 50 mg/mg, 1.5 to 50 mg/kb, 2 to 50 mg/kg, 2.5 to 50 mg/kg, 3 to 50 mg/kg, 3.5 to 50 mg/kg, 4 to 50 mg/kg, 4.5 to 50 mg/kg, 5 to 50 mg/kg, 7.5 to 50 mg/kg, 10 to 50 mg/kg, 15 to 50 mg/kg, 20 to 50 mg/kg, 20 to 50 mg/kg, 25 to 50 mg/kg, 25 to 50 mg/kg, 30 to 50 mg/kg, 35 to 50 mg/kg, 40 to 50 mg/kg, 45 to 50 mg/kg, 0.1 to 45 mg/kg, 0.25 to 45 mg/kg, 0.5 to 45 mg/kg, 0.75 to 45 mg/kg, 1 to 45 mg/mg, 1.5 to 45 mg/kb, 2 to 45 mg/kg, 2.5 to 45 mg/kg, 3 to 45 mg/kg, 3.5 to 45 mg/kg, 4 to 45 mg/kg, 4.5 to 45 mg/kg, 5 to 45 mg/kg, 7.5 to 45 mg/kg, 10 to 45 mg/kg, 15 to 45 mg/kg, 20 to 45 mg/kg, 20 to 45 mg/kg, 25 to 45 mg/kg, 25 to 45 mg/kg, 30 to 45 mg/kg, 35 to 45 mg/kg, 40 to 45 mg/kg, 0.1 to 40 mg/kg, 0.25 to 40 mg/kg, 0.5 to 40 mg/kg, 0.75 to 40 mg/kg, 1 to 40 mg/mg, 1.5 to 40 mg/kb, 2 to 40 mg/kg, 2.5 to 40 mg/kg, 3 to 40 mg/kg, 3.5 to 40 mg/kg, 4 to 40 mg/kg, 4.5 to 40 mg/kg, 5 to 40 mg/kg, 7.5 to 40 mg/kg, 10 to 40 mg/kg, 15 to 40 mg/kg, 20 to 40 mg/kg, 20 to 40 mg/kg, 25 to 40 mg/kg, 40 mg/kg, 30 to 40 mg/kg, 35 to 40 mg/kg, 0.1 to 30 mg/kg, 0.25 to 30 mg/kg, 0.5 to 30 mg/kg, 0.75 to 30 mg/kg, 1 to 30 mg/mg, 1.5 to 30 mg/kb, 2 to 30 mg/kg, 2.5 to 30 mg/kg, 3 to 30 mg/kg, 3.5 to 30 mg/kg, 4 to 30 mg/kg, 4.5 to 30 mg/kg, 5 to 30 mg/kg, 7.5 to 30 mg/kg, 10 to 30 mg/kg, 15 to 30 mg/kg, 20 to 30 mg/kg, 20 to 30 mg/kg, 25 to 30 mg/kg, 0.1 to 20 mg/kg, 0.25 to 20 mg/kg, 0.5 to 20 mg/kg, 0.75 to 20 mg/kg, 1 to 20 mg/kg, 1.5 to 20 mg/kb, 2 to 20 mg/kg, 2.5 to 20 mg/kg, 3 to 20 mg/kg, 3.5 to 20 mg/kg, 4 to 20 mg/kg, 4.5 to 20 mg/kg, 5 to 20 mg/kg, 7.5 to 20 mg/kg, 10 to 20 mg/kg, or 15 to 20 mg/kg. In one embodiment, when a composition of the invention comprises a antisense polynucleotide agent as described herein and an N-acetylgalactosamine, subjects can be administered a therapeutic amount of 10 to 30 mg/kg of antisense polynucleotide agent. Values and ranges intermediate to the recited values are also intended to be part of this invention.

[0453] For example, subjects can be administered a therapeutic amount of antisense polynucleotide agent, such as about 0.1, 0.2, 0.3, 0.4, 0.5, 0.6, 0.7, 0.8, 0.9, 1, 1.1, 1.2, 1.3, 1.4, 1.5, 1.6, 1.7, 1.8, 1.9, 2, 2.1, 2.2, 2.3, 2.4, 2.5, 2.6, 2.7, 2.8, 2.9, 3, 3.1, 3.2, 3.3, 3.4, 3.5, 3.6, 3.7, 3.8, 3.9, 4, 4.1, 4.2, 4.3, 4.4, 4.5, 4.6, 4.7, 4.8, 4.9, 5, 5.1, 5.2, 5.3, 5.4, 5.5, 5.6, 5.7, 5.8, 5.9, 6, 6.1, 6.2, 6.3, 6.4, 6.5, 6.6, 6.7, 6.8, 6.9, 7, 7.1, 7.2, 7.3, 7.4, 7.5, 7.6, 7.7, 7.8, 7.9, 8, 8.1, 8.2, 8.3, 8.4, 8.5, 8.6, 8.7, 8.8, 8.9, 9, 9.1, 9.2, 9.3, 9.4, 9.5, 9.6, 9.7, 9.8, 9.9, 10, 10.5, 11, 11.5, 12, 12.5, 13, 13.5, 14, 14.5, 15, 15.5, 16, 16.5, 17, 17.5, 18, 18.5, 19, 19.5, 20, 20.5, 21, 21.5, 22, 22.5, 23, 23.5, 24, 24.5, 25, 25.5, 26, 26.5, 27, 27.5, 28, 28.5, 29, 29.5, 30, 31, 32, 33, 34, 34, 35, 36, 37, 38, 39, 40, 41, 42, 43, 44, 45, 46, 47, 48, 49, or 50 mg/kg. Values and ranges intermediate to the recited values are also intended to be part of this invention.

[0454] The antisense polynucleotide agent can be administered by intravenous infusion over a period of time, such as over a 5, 6, 7, 8, 9, 10, 11, 12, 13, 14, 15, 16, 17, 18, 19, 20, 21, 22, 23, 24, or a 25 minute period. The administration may be repeated, for example, on a regular basis, such as weekly, biweekly (i.e., every two weeks) for one month, two months, three months, four months or longer. After an initial treatment regimen, the treatments can be administered on a less frequent basis. For example, after administration weekly or biweekly for three months, administration can be repeated once per month, for six months or a year or longer.

[0455] Administration of the antisense polynucleotide agent can reduce PD-L1 levels, e.g., in a cell, tissue, blood, urine or other compartment of the patient by at least 20%, 25%, 30%, 35%, 40%, 45%, 50%, 55%, 60%, 65%, 70%, 75%, 80%, 85%, 90%, 95%, or to below the level of detection of the assay method used.

[0456] Before administration of a full dose of the antisense polynucleotide agent, patients can be administered a smaller dose, such as a 5% infusion, and monitored for adverse effects, such as an allergic reaction. In another example, the patient can be monitored for unwanted immunostimulatory effects, such as increased cytokine (e.g., TNF-alpha or INF-alpha) levels. Owing to the inhibitory effects on PD-L1 expression, a composition according to the invention or a pharmaceutical composition prepared therefrom can enhance the quality of life.

[0457] An antisense polynucleotide agent of the invention may be administered in “naked” form, or as a “free antisense polynucleotide agent.” A naked antisense polynucleotide agent is administered in the absence of a pharmaceutical composition. The naked antisense polynucleotide agent may be in a suitable buffer solution. The buffer solution may comprise acetate, citrate, prolamine, carbonate, or phosphate, or any combination thereof. In one embodiment, the buffer solution is phosphate buffered saline (PBS). The pH and osmolarity of the buffer solution containing the antisense polynucleotide agent can be adjusted such that it is suitable for administering to a subject.

[0458] Alternatively, an antisense polynucleotide agent of the invention may be administered as a pharmaceutical composition, such as an antisense polynucleotide agent liposomal formulation.

[0459] Subjects that would benefit from a reduction or inhibition of PD-L1 gene expression are those having a PD-L1-associated disease or disorder as described herein. In one embodiment, a subject having a PD-L1-associated disease has an infection, especially an intracellular infection. In another embodiment, a subject having a PD-L1-associated disease has hepatitis B. In another embodiment, a subject having a PD-L1-associated disease has hepatitis D. In yet another embodiment, a subject having a PD-L1-associated disease has tuberculosis. In one embodiment, a subject having a PD-L1-associated disease has cancer. In another embodiment, a subject having a PD-L1-associated disease has liver cancer. In yet another embodiment, a subject having a PD-L1-associated disease has hepatocellular carcinoma.

[0460] The invention further provides methods and uses of an antisense polynucleotide agent or a pharmaceutical composition thereof (including methods and uses of an antisense polynucleotide agent or a pharmaceutical composition comprising an antisense polynucleotide agent and an agent selected depending on the disease to be treated, e.g., for the treatment of an infection, for example, an HBV infection, or cancer, for treating a subject that would benefit from reduction or inhibition of PD-L1 expression, e.g., a subject having a PD-L1-associated disease, in combination with other pharmaceuticals or other therapeutic methods, e.g., with known pharmaceuticals or known therapeutic methods, such as, for example, those which are currently employed for treating these disorders. For example, in certain embodiments, an antisense polynucleotide agent targeting PD-L1 is administered in combination with, e.g., an agent useful in treating a PD-L1-associated disease as described elsewhere herein.

[0461] For example, additional therapeutics and therapeutic methods suitable for treating a subject that would benefit from reducton in PD-L1 expression, e.g., a subject having a Programmed cell death 1 ligand 1-associated disease, include e.g., surgery or radiation in the treatment of cancer.

[0462] The antisense polynucleotide agent and an additional therapeutic agent or treatment may be administered at the same time or in the same combination, e.g., parenterally, or the additional therapeutic agent can be administered as part of a separate composition or at separate times or by another method known in the art or described herein.

[0463] The present invention also provides methods of using an antisense polynucleotide agent of the invention or a composition containing an antisense polynucleotide agent of the invention to reduce or inhibit Programmed cell death 1 ligand 1 expression in a cell. In other aspects, the present invention provides an antisense polynucleotide agent of the invention or a composition comprising an antisense polynucleotide agent of the invention for use in reducing or inhibiting PD-L1 expression in a cell. In yet other aspects, use of an antisense polynucleotide agent of the invention or a composition comprising an antisense polynucleotide agent of the invention for the manufacture of a medicament for reducing or inhibiting PD-L1 expression in a cell are provided.

[0464] The methods and uses include contacting the cell with an antisense polynucleotide agent, e.g., a antisense polynucleotide agent, of the invention and maintaining the cell for a time sufficient to obtain antisense inhibition of a PD-L1 gene, thereby inhibiting expression of the PD-L1 gene in the cell.

[0465] Reduction in gene expression can be assessed by any methods known in the art and as provided herein.

### IX. Diagnostic Criteria and Treatment for PD-L1 Related Diseases

[0466] Exemplary diagnostic and monitoring criteria for various PD-L1 related diseases are provided below.

[0467] A. Hepatitis B

[0468] Hepatitis is a general term meaning inflammation of the liver and can be caused by a variety of different viruses such as hepatitis A, B, C, D and E. Since the development of jaundice is a characteristic feature of liver disease, a correct diagnosis can only be made by testing patients' sera for the presence of specific anti-viral antigens or antibodies. The severe pathological consequences of persistent HBV infections include the development of chronic hepatic insufficiency, cirrhosis, and hepatocellular carcinoma (HCC). In addition, HBV carriers can transmit the disease for many years.

[0469] HBV is a large virus and does not cross the placenta, however, pregnant women who are infected with HBV can transmit their disease to their infants at birth. If not vaccinated at birth, many of these infants develop lifelong HBV infections, and many develop liver failure or liver cancer later in life. Following acute HBV infection, the risk of developing chronic infection varies inversely with age. Chronic HBV infection occurs among about 90% of infants infected at birth, 25-50% of children infected at 1-5 years of age and about 1-5% of persons infected as older children and adults. Chronic HBV infection is also common in persons with immunodeficiency (Hepatitis B: World Health Organization. Department of Communicable Diseases Surveillance and Response, available at www.who.int/csr/disease/hepatitis/HepatitisB_whocdscsrlyo2002_2.pdf?ua=1, incorporated herein by reference).

[0470] During the incubation phase of the disease (6 to 24 weeks), patients may feel unwell with possible nausea, vomiting, diarrhea, anorexia, and headaches. Patients may then become jaundiced although low grade fever and loss of appetite may improve. Sometimes HBV infection produces neither jaundice nor obvious symptoms. The asymptomatic cases can be identified by detecting biochemical or virus-specific serologic alterations in their blood. Such asymptomatic individuals may become silent carriers of the virus and constitute a reservoir for further transmission to others.

[0471] Most adult patients recover completely from their HBV infection, but others, about 5 to 10%, will not clear the virus and will progress to become asymptomatic carriers or develop chronic hepatitis possibly resulting in cirrhosis or liver cancer. Rarely, some patients may develop fulminant hepatitis and die. Persistent or chronic HBV infection is among the most common persistent viral infections in humans. More than 350 million people in the world today are estimated to be persistently infected with HBV. A large fraction of these are in eastern Asia and sub-Saharan Africa, where the associated complications of chronic liver disease and liver cancer are the most important health problems.

[0472] The three standard blood tests for hepatitis B (HBs antigen, antiHBs antibody, and HBc antigen) can determine if a person is currently infected with HBV, has recovered, is a chronic carrier, or is susceptible to HBV infection.

| Assay results | | | |
|---|---|---|---|
| HBsAg | anti-HBs | anti-HBc | Interpretation |
| + | − | − | Early acute HBV infection. |
| + | +/− | + | Acute or chronic HBV infection. |
| | | | Differentiate with IgM-anti-HBc. |
| | | | Determine level of infectivity |
| | | | with HBeAg or HBV DNA. |
| − | + | + | Indicates previous HBV infection |
| | | | and immunity to hepatitis B. |
| − | − | + | Possibilities include: past HBV |
| | | | infection; low-level HBV carrier; |
| | | | time span between disappearance |
| | | | of HBsAg and appearance of anti- |
| | | | HBs; or false-positive or nonspecific |
| | | | reaction. Investigate with IgM |
| | | | anti-HBc, and/or challenge with |
| | | | HBsAg vaccine. When present, anti- |
| | | | HBe helps validate the anti-HBc reactivity. |
| − | − | − | Another infectious agent, toxic injury |
| | | | to the liver, disorder of |
| | | | immunity, hereditary disease of |
| | | | the liver, or disease of the biliary tract. |
| − | + | − | Vaccine-type response. |

[0473] From: Hollinger F B, Liang T J. Hepatitis B Virus. In: Knipe D M et al., eds. Fields Virology, 4th ed., Philadelphia, Lippincott Williams & Wilkins, 2001:2971-3036.

[0474] Further serological tests can be performed to differentiate subjects with chronic or acute HBV, or who may be carriers. A number of vaccines against HBV are available and are presently far more effective, and cost-effective, than treatment.

[0475] Currently, there is no treatment available for acute hepatitis B. Symptomatic treatment of nausea, anorexia, vomiting, and other symptoms may be indicated.

[0476] Treatment of chronic hepatitis B is aimed at eliminating infectivity to prevent transmission and spread of HBV, at halting the progression of liver disease and improving the clinical and histologic picture, and at preventing HCC from developing, by losing markers of HBV replication in serum and liver like HBV DNA, HBeAg, and HBcAg. Normalization of ALT activity, resolution of hepatic inflammation and the improvement of a patient's symptoms usually accompany these virological changes. However, presently available treatments for HBV are rarely curative. Patients must be on treatment indefinitely to suppress the disease and prevent transmission.

[0477] There are two main classes of treatment: antivirals: aimed at suppressing or destroying HBV by interfering with viral replication; and immune modulators: aimed at helping the human immune system to mount a defence against the virus. Neither corticosteroids, which induce an enhanced expression of virus and viral antigens, and a suppression of T-lymphocyte function, nor adenine arabinoside, acyclovir, or dideoxyinosine, have been shown to be beneficial for the treatment of chronic hepatitis B.

[0478] Currently, chronic hepatitis B is treated with interferons to modulate immune response. The only approved ones are interferon-α-2a and interferon-α-2b. Interferons display a variety of properties that include antiviral, immunomodulatory, and antiproliferative effects. They enhance T-cell helper activity, cause maturation of B lymphocytes, inhibit T-cell suppressors, and enhance HLA type I expression. To be eligible for interferon therapy, patients should have infection documented for at least six months, elevated liver enzymes (AST and ALT) and an actively dividing virus in their blood (HBeAg, and/or HBV DNA positive tests). Patients with acute infection, end stage cirrhosis or other major medical problems should not be treated. Interferon-α produces a long-term, sustained remission of the disease in 35% of those with chronic hepatitis B, with normalization of liver enzymes and loss of the three markers for an active infection (HBeAg, HBV DNA, and HBsAg). Complete elimination of the virus is achieved in some carefully selected patients.

[0479] Interferon therapy for patients with HBV-related cirrhosis decreases significantly the HCC rate, particularly in patients with a larger amount of serum HBV DNA. In patients with HBeAg-positive compensated cirrhosis, virological and biochemical remission following interferon therapy is associated with improved survival. In patients with chronic HBV infection, the clearance of HBeAg after treatment with interferon-α is associated with improved clinical outcomes.

[0480] Interferon-α (Intron A (interferon-α-2b), Schering Plough, and Roferon, (interferon-α-2a) Roche Labs) is the primary treatment for chronic hepatitis B, The standard duration of therapy is considered 16 weeks. Patients who exhibit a low level of viral replication at the end of the standard regimen benefit most from prolonged treatment.

[0481] Nucleotide and nucleoside analogs have long been used for the treatment of HBV. Compounds presently available and in development include lamivudine, adefovir, entecavir, telbivudine, tenofovir, emtricitabine, clevudine, ritonavir, dipivoxil, lobucavir, famvir, FTC, N-Acetyl-Cysteine (NAC), PC1323, theradigm-HBV, thymosin-alpha, and ganciclovir. Some are useful against other viral infections, e.g., HCV, HIV, whereas others are effective predominantly in the treatment of HBV.

[0482] Permanent loss of HBV DNA and HBeAg are considered the goals of antiviral treatment, as these result is associated with an improvement in necro-inflammatory damage, and reduced infectivity.

[0483] B. Hepatitis D

[0484] Hepatitis Delta virus (HDV) is a defective virus that is only infectious in the presence of active HBV infection. HDV infection occurs as either coinfection with HBV or superinfection of an HBV carrier. Coinfection usually resolves. Superinfection, however, causes frequently chronic HDV infection and chronic active hepatitis. Both types of infections may cause fulminant hepatitis.

[0485] Routes of transmission are similar to those of HBV. Preventing acute and chronic HBV infection of susceptible persons by vaccination will also prevent HDV infection. Certain HBV treatments are also effective in the treatment of HDV, e.g., interferon-alpha, with or without adefovir. However others, like lamivudine, an inhibitor of HBV-DNA replication, are not useful for the treatment of chronic hepatitis D.

[0486] D. Tuberculosis (TB)

[0487] Tuberculosis is a disease caused by Mycobacterium tuberculosis. Tuberculosis is associated with symptoms including unexplained weight loss, loss of appetite, night sweats, fever, fatigue, coughing for longer than three weeks, hemoptysis (coughing up blood), and chest pain. There are two kinds of tests that are used to determine if a person has been infected with TB bacteria: the tuberculin skin test and TB blood tests which include QuantiFERON®—TB Gold In-Tube test (QFT-GIT) and T-SPOT®.TB test (T-Spot). However, the tests are not indicative of an active TB infection. Diagnosis of TB infection includes assessment of medical history, physical examination, chest radiography, and diagnostic microbiology culture assay including an analysis for drug resistance. Assessment of clinically relevant changes in signs or symptoms of TB is within the ability of those of skill in the art.

[0488] D. Cancer

[0489] Cancer refers to any of various malignant neoplasms characterized by the proliferation of anaplastic cells that tend to invade surrounding tissue and metastasize to new body sites and also refers to the pathological condition characterized by such malignant neoplastic growths. A cancer can be a tumor or hematological malignancy, and includes but is not limited to, all types of lymphomas/leukemias, carcinomas and sarcomas. In certain embodiments, cancer includes hepatic cancer. In certain embodiments, cancer includes hepatocellular carcinoma (HCC).

[0490] RECIST criteria are clinically accepted assessment criteria used to provide a standard approach to solid tumor measurement and provide definitions for objective assessment of change in tumor size for use in clinical trials. Such criteria can also be used to monitor response of an individual undergoing treatment for a solid tumor. The RECIST 1.1 criteria are discussed in detail in Eisenhauer et al., New response evaluation criteria in solid tumors: Revised RECIST guideline (version 1.1). Eur. J. Cancer. 45:228-247, 2009, which is incorporated herein by reference. Response criteria for target lesions include:

[0491] Complete Response (CR): Disappearance of all target lesions. Any pathological lymph nodes (whether target or non-target) must have a reduction in short axis to <10 mm.

[0492] Partial Response (PR): At least a 30% decrease in the sum of diameters of target lesion, taking as a reference the baseline sum diameters.

[0493] Progressive Diseases (PD): At least a 20% increase in the sum of diameters of target lesions, taking as a reference the smallest sum on the study (this includes the baseline sum if that is the smallest on the study). In addition to the relative increase of 20%, the sum must also demonstrate an absolute increase of at least 5 mm. (Note: the appearance of one or more new lesions is also considered progression.)

[0494] Stable Disease (SD): Neither sufficient shrinkage to qualify for PR nor sufficient increase to qualify for PD, taking as a reference the smallest sum diameters while on study.

[0495] RECIST 1.1 criteria also consider non-target lesions which are defined as lesions that may be measurable, but need not be measured, and should only be assessed qualitatively at the desired time points. Response criteria for non-target lesions include:

[0496] Complete Response (CR): Disappearance of all non-target lesions and normalization of tumor marker levels. All lymph nodes must be non-pathological in size (<10 mm short axis).

[0497] Non-CR/Non-PD: Persistence of one or more non-target lesion(s) and/or maintenance of tumor marker level above the normal limits.

[0498] Progressive Disease (PD): Unequivocal progression of existing non-target lesions. The appearance of one or more new lesions is also considered progression. To achieve “unequivocal progression” on the basis of non-target disease, there must be an overall level of substantial worsening of non-target disease such that, even in the presence of SD or PR in target disease, the overall tumor burden has increased sufficiently to merit discontinuation of therapy. A modest “increase” in the size of one or more non-target lesions is usually not sufficient to qualify for unequivocal progression status. The designation of overall progression solely on the basis of change in non-target disease in the face of SD or PR in target disease will therefore be extremely rare.

[0499] Clinically acceptable criteria for response to treatment in acute leukemias are as follows:

[0500] Complete remission (CR): The patient must be free of all symptoms related to leukemia and have an absolute neutrophil count of ≥1.0×10⁹/L, platelet count ≥100×10⁹/L, and normal bone marrow with <5% blasts and no Auer rods.

[0501] Complete remission with incomplete blood count recovery (Cri): As per CE, but with residual thrombocytopenia (platelet count <100×10⁹/L) or residual neutropenia (absolute neutrophil count <1.0×10 9/L).

[0502] Partial remission (PR): A≥50% decrease in bone marrow blasts to 5 to 25% abnormal cells in the marrow; or CR with ≤5% blasts if Auer rods are present.

[0503] Treatment failure: Treatment has failed to achieve CR, Cri, or PR. Recurrence.

[0504] Relapse after confirmed CR: Reappearance of leukemic blasts in peripheral bood or ≥5% blasts in the bone marrow not attributable to any other cause (e.g., bone marrow regeneration after consolidated therapy) or appearance of new dysplastic changes.

[0505] Uses of the compositions and methods of the invention include achieving at least stable disease in a subject with a solid tumor for sufficient time to meet the definition of stable disease by RECIST criteria. In certain embodiments, the use of the compositions and methods of the invention include achieving at least a partial response in a subject with a solid tumor for sufficient time to meet the definition of stable disease by RECIST criteria.

[0506] Uses of the compositions and methods of the invention include achieving at least a partial remission in a subject with an acute leukemia for sufficient time to meet the definition of stable disease by RECIST criteria. In certain embodiments, the use of the compositions and methods of the invention include achieving at least a complete remission with incomplete blood count recovery in a subject with an acute leukemia for sufficient time to meet the definition of stable disease by RECIST criteria.

[0507] Unless otherwise defined, all technical and scientific terms used herein have the same meaning as commonly understood by one of ordinary skill in the art to which this invention belongs. Although methods and materials similar or equivalent to those described herein can be used in the practice or testing of the antisense polynucleotide agents and methods featured in the invention, suitable methods and materials are described below. All publications, patent applications, patents, and other references mentioned herein are incorporated by reference in their entirety. In case of conflict, the present specification, including definitions, will control. In addition, the materials, methods, and examples are illustrative only and not intended to be limiting.

### EXAMPLES

### Example 1. Bioinformatics and Antisense Synthesis

[0508] A set of polynucleotide agents targeting the human CD274, also known as PD-L1 (“programmed cell death 1 ligand 1”, human: NCBI refseqID NM_001267706.1; NCBI GeneID: 29126), were designed using custom R and Python scripts. The rationale and method for the set of designs is as follows: the predicted efficacy for every potential 19mer from position 1 through the end of the mRNA was determined with a linear model derived the direct measure of mRNA knockdown from more than 20,000 distinct ASO (antisense oligo) designs targeting a large number of vertebrate genes. Starting from position 1 a set of s was created by systematically picking a design whose 5′ base began every 11 bases along the entire length of the mRNA. Predicted efficacy was used to allow for the substitution of a neighboring, predicted-to-be-more-potent design where the neighboring was 1 base either toward the 5′ or 3′ end of the mRNA. Low complexity designs were removed by filtering with a Shannon entropy index greater than 1.35.

[0509] The antisense polynucleotides targeting PD-L1 were synthesized using standard synthesis methods well known in the art.

[0510] A detailed list of antisense molecules targeting Programmed cell death 1 ligand 1 is shown in Table 3.

### Example 2. In vitro screening

[0511] Hepa1-6 cells were plated at a density of 20,000 cells per well in 96-well plates and transfected using Lipofectimine 2000 according the manufacturer's protocol (Invitrogen). Cells were transfected with 20 ng of dual-luciferase reporter construct containing the CD274 sequence corresponding to NM_001267706.1 (see, e.g., SEQ ID NO:14) and 10 nM final concentration of the agent. Transfected cells were incubated for 24 hours at 37° C. Cells were subsequently harvested and Firefly (transfection control) and Renilla (fused to CD274 target sequence in 3′ UTR; see, e.g., SEQ ID NOs:13 and 15) luciferase were measured. Firefly luciferase activity was measured by adding a volume of Dual-Glo® Luciferase Reagent equal to the culture medium volume to each well and mixed. The mixture was incubated at room temperature for 30 minutes before luminescense (500 nm) was measured on a spectrophotometer to detect the Firefly luciferase signal. Renilla luciferase activity was measured by adding the same volume of room temperature of Dual-Glo Stop & Glo Reagent to each well and the plates were incubated for 10-15 minutes before luminescence was again measured to determine the Renilla luciferase signal. ASO activity was determined by normalizing the Renilla signal to the Firefly signal within each well. The magnitude of ASO activity was then assessed relative to cells that were transfected with the same vector but were not treated with ASO or were treated with a non-targeting ASO. All transfections were done in triplicate. Table 4 shows the results of the single dose screen in cells transfected with the indicated antisense polynucleotide agent.

TABLE 2
Abbreviations of nucleotide monomers used in nucleic
acid sequence representation. It will be understood
that these monomers, when present in an oligonucleotide,
are mutually linked by 5′-3′-phosphodiester bonds.

| Abbreviation | Nucleotide(s) |
|---|---|
| A | Adenosine-3′-phosphate |
| Af | 2′-fluoroadenosine-3′-phosphate |
| Afs | 2′-fluoroadenosine-3′-phosphorothioate |
| As | adenosine-3′-phosphorothioate |
| a | 2′-O-methyladenosine-3′-phosphate |
| as | 2′-O-methyladenosine-3′-phosphorothioate |
| C | cytidine-3′-phosphate |
| dA | 2′-deoxyadenosine-3′-phosphate |
| dAs | 2′-deoxyadenosine-3′-phosphorothioate |
| Cf | 2′-fluorocytidine-3′-phosphate |
| Cfs | 2′-fluorocytidine-3′-phosphorothioate |
| Cs | cytidine-3′-phosphorothioate |
| c | 2′-O-methylcytidine-3′-phosphate |
| cs | 2′-O-methylcytidine-3′-phosphorothioate |
| dC | 2′-deoxycytidine-3′-phosphate |
| dCs | 2′-deoxycytidine-3-phosphorothioate |
| G | guanosine-3′-phosphate |
| Gf | 2′-fluoroguanosine-3′-phosphate |
| Gfs | 2′-fluoroguanosine-3′-phosphorothioate |
| Gs | guanosine-3′-phosphorothioate |
| g | 2′-O-methylguanosine-3′-phosphate |
| gs | 2′-O-methylguanosine-3′-phosphorothioate |
| dG | 2′-deoxyguanosine-3′-phosphate |
| dGs | 2′-deoxyguanosine-3′-phosphorothioate |
| T | 5′-methyluridine-3′-phosphate |
| Tf | 2′-fluoro-5-methyluridine-3′-phosphate |
| Tfs | 2′-fluoro-5-methyluridine-3′-phosphorothioate |
| Ts | 5-methyluridine-3′-phosphorothioate |
| t | 2′-O-methyl-5-methyluridine-3′-phosphate |
| ts | 2′-O-methyl-5-methyluridine-3′-phosphorothioate |
| dT | 2′-deoxythymidine-3′-phosphate |
| dTs | 2′-deoxythymidine-3′-phosphorothioate |
| U | Uridine-3′-phosphate |
| Uf | 2′-fluorouridine-3′-phosphate |
| Ufs | 2′-fluorouridine-3′-phosphorothioate |
| Us | uridine-3′-phosphorothioate |
| u | 2′-O-methyluridine-3′-phosphate |
| us | 2′-O-methyluridine-3′-phosphorothioate |
| dU | 2′-deoxyuridine-3′-phosphate |
| dUs | 2′-deoxyuridine-3′-phosphorothioate |
| s | phosphorothioate linkage |
| N | any nucleotide (G, A, C, T or U) |
| L96 | N-[tris(GalNAc-alkyl)-amidodecanoyl)]- |
| | 4-hydroxyprolinol Hyp-(GalNAc-alkyl)3 |
| (dt) | deoxy-thymine |
| (5MdC) | 5′-methyl-deoxycytidine-3′-phosphate |
| (5MdC)s | 5′-methyl-deoxycytidine-3′-phosphorothioate |

TABLE 3
Unmodified and modified antisense polynucleotides targeting Programmed cell death 1 ligand 1.

| | | SEQ | | SEQ | Position in |
|---|---|---|---|---|---|
| Oligo | | ID | | ID | NM_00126 |
| Name | Unmodified Sequence (5′ to 3′) | NO | Modified Sequence (5′ to 3′) | NO | 7706.1 |
| A-142854 | GGGACGCGCCAGCTGCUCAG | 16 | gsgsgsascsdGs(m5dCs)dGs(m5dCs)(m5dCs)dAsdGs(m5dCs)dTsdGscsuscsasg | 318 | 10 |
| A-142855 | ACUGGGGCCGCGCGGGACGC | 17 | ascsusgsgsdGsdGs(m5dCs)(m5dCs)dGs(m5dCs)dGs(m5dCs)dGsdGsgsascsgsc | 319 | 23 |
| A-142856 | AGCUGCGCAGAACTGGGGCC | 18 | asgscsusgs(m5dCs)dGs(m5dCs)dAsdGsdAsdAs(m5dCs)dTsdGsgsgsgscsc | 320 | 34 |
| A-142857 | AGCCUCGGGAAGCTGCGCAG | 19 | asgscscsus(m5dCs)dGsdGsdGsdAsdAsdGs(m5dCs)dTsdGscsgscsasg | 321 | 44 |
| A-142858 | CGGCUGGTGCGGAGCCUCGG | 20 | csgsgscsusdGsdGsdTsdGs(m5dCs)dGsdGsdAsdGs(m5dCs)csuscsgsg | 322 | 56 |
| A-142859 | ACAGAAGCGCGGCTGGUGCG | 21 | ascsasgsasdAsdGs(m5dCs)dGs(m5dCs)dGsdGs(m5dCs)dTsdGsgsusgscsg | 323 | 65 |
| A-142860 | GCCCUGCAGGCGGACAGAAG | 22 | gscscscsusdGs(m5dCs)dAsdGsdGs(m5dCs)dGsdGsdAs(m5dCs)asgsasasg | 324 | 78 |
| A-142861 | CUUUCTGGAATGCCCUGCAG | 23 | csusususcsdTsdGsdGsdAsdAsdTsdGs(m5dCs)(m5dCs)(m5dCs)usgscsasg | 325 | 89 |
| A-142862 | AUAUCCTCATCTTTCUGGAA | 24 | asusasuscs(m5dCs)dTs(m5dCs)dAsdTs(m5dCs)dTsdTsdTs(m5dCs)usgsgsasa | 326 | 99 |
| A-142863 | AAGACAGCAAATATCCUCAU | 25 | asasgsascsdAsdGs(m5dCs)dAsdAsdAsdTsdAsdTs(m5dCs)csuscsasu | 327 | 109 |
| A-142864 | GGUCATGAATATAAAGACAG | 26 | gsgsuscsasdTsdGsdAsdAsdTsdAsdTsdAsdAsdAsgsascsasg | 328 | 122 |
| A-142865 | AAUGCCAGTAGGTCAUGAAU | 27 | asasusgscs(m5dCs)dAsdGsdTsdAsdGsdGsdTs(m5dCs)dAsusgsasasu | 329 | 132 |
| A-142866 | GGGCGTTCAGCAAATGCCAG | 28 | gsgsgscsgsdTsdTs(m5dCs)dAsdGs(m5dCs)dAsdAsdAsdTsgscscsasg | 330 | 144 |
| A-142867 | UUGUUGTATGGGGCGUUCAG | 29 | ususgsususdGsdTsdAsdTsdGsdGsdGsdGs(m5dCs)dGsususcsasg | 331 | 154 |
| A-142868 | UUUGGTTGATTTTGTUGUAU | 30 | usususgsgsdTsdTsdGsdAsdTsdTsdTsdTsdGsdTsusgsusasu | 332 | 165 |
| A-142869 | ACCAAAATTCTTTGGUUGAU | 31 | ascscsasasdAsdAsdTsdTs(m5dCs)dTsdTsdTsdGsdGsususgsasu | 333 | 175 |
| A-142870 | ACUGGATCCACAACCAAAAU | 32 | ascsusgsgsdAsdTs(m5dCs)(m5dCs)dAs(m5dCs)dAsdAs(m5dCs)(m5dCs)asasasas | 334 | 187 |
| | | | u | | |
| A-142871 | UGUUCAGAGGTGACTGGAUC | 33 | usgsususcsdAsdGsdAsdGsdGsdTsdGsdAs(m5dCs)dTsgsgsasusc | 335 | 199 |
| A-142872 | AUGUCAGTTCATGTTCAGAG | 34 | asusgsuscsdAsdGsdTsdTs(m5dCs)dAsdTsdGsdTsdTscsasgsasg | 336 | 210 |
| A-142873 | CUCAGCCTGACATGTCAGUU | 35 | csuscsasgs(m5dCs)(m5dCs)dTsdGsdAs(m5dCs)dAsdTsdGsdTscsasgsusu | 337 | 221 |
| A-142874 | UGGGGTAGCCCTCAGCCUGA | 36 | usgsgsgsgsdTsdAsdGs(m5dCs)(m5dCs)(m5dCs)dTs(m5dCs)dAsdGscscsusgsa | 338 | 231 |
| A-142875 | UGACUTCGGCCTTGGGGUAG | 37 | usgsascsusdTs(m5dCs)dGsdGs(m5dCs)(m5dCs)dTsdTsdGsdGsgsgsusasg | 339 | 243 |
| A-142876 | UUGUCCAGATGACTTCGGCC | 38 | ususgsuscs(m5dCs)dAsdGsdAsdTsdGsdAs(m5dCs)dTsdTscsgsgscsc | 340 | 252 |
| A-142877 | AUGGUCACTGCTTGTCCAGA | 39 | asusgsgsus(m5dCs)dAs(m5dCs)dTsdGs(m5dCs)dTsdTsdGsdTscscsasgsa | 341 | 263 |
| A-142878 | ACUCAGGACTTGATGGUCAC | 40 | ascsuscsasdGsdGsdAs(m5dCs)dTsdTsdGsdAsdTsdGsgsuscsasc | 342 | 275 |
| A-142879 | GUGGUCTTACCACTCAGGAC | 41 | gsusgsgsus(m5dCs)dTsdTsdAs(m5dCs)(m5dCs)dAs(m5dCs)dTs(m5dCs)asgsgsas | 343 | 286 |
| | | | c | | |
| A-142880 | AUUGGTGGTGGTGGTCUUAC | 42 | asususgsgsdTsdGsdGsdTsdGsdGsdTsdGsdGsdTscsususasc | 344 | 296 |
| A-142881 | CCUCUCTCTTGGAATUGGUG | 43 | cscsuscsus(m5dCs)dTs(m5dCs)dTsdTsdGsdGsdAsdAsdTsusgsgsusg | 345 | 309 |
| A-142882 | AAAGCTTCTCCTCTCUCUUG | 44 | asasasgscsdTsdTs(m5dCs)dTs(m5dCs)(m5dCs)dTs(m5dCs)dTs(m5dCs)uscsusus | 346 | 318 |
| | | | g | | |
| A-142883 | UGGUCACATTGAAAAGCUUC | 45 | usgsgsuscsdAs(m5dCs)dAsdTsdTsdGsdAsdAsdAsdAsgscsususc | 347 | 330 |
| A-142884 | UCUCAGTGTGCTGGTCACAU | 46 | uscsuscsasdGsdTsdGsdTsdGs(m5dCs)dTsdGsdGsdTscsascsasu | 348 | 341 |
| A-142885 | UUGUGTTGATTCTCAGUGUG | 47 | ususgsusgsdTsdTsdGsdAsdTsdTs(m5dCs)dTs(m5dCs)dAsgsusgsusg | 349 | 351 |
| A-142886 | UCUCATTAGTTGTTGUGUUG | 48 | uscsuscsasdTsdTsdAsdGsdTsdTsdGsdTsdTsdGsusgsususg | 350 | 363 |
| A-142887 | UGCAGTAGAAAATCTCAUUA | 49 | usgscsasgsdTsdAsdGsdAsdAsdAsdAsdTs(m5dCs)dTscsasususa | 351 | 375 |
| A-142888 | UCCUAAAAGTGCAGTAGAAA | 50 | uscscsusasdAsdAsdAsdGsdTsdGs(m5dCs)dAsdGsdTsasgsasasa | 352 | 384 |
| A-142889 | AGGAUCTAATCTCCTAAAAG | 51 | asgsgsasus(m5dCs)dTsdAsdAsdTs(m5dCs)dTs(m5dCs)(m5dCs)dTsasasasasg | 353 | 395 |
| A-142890 | UGGUUTTCCTCAGGAUCUAA | 52 | usgsgsususdTsdTs(m5dCs)(m5dCs)dTs(m5dCs)dAsdGsdGsdAsuscsusasa | 354 | 406 |
| A-142891 | AAUUCAGCTGTATGGUUUUC | 53 | asasususcsdAsdGs(m5dCs)dTsdGsdTsdAsdTsdGsdGsususususc | 355 | 418 |
| A-142892 | UGGGATGACCAATTCAGCUG | 54 | usgsgsgsasdTsdGsdAs(m5dCs)(m5dCs)dAsdAsdTsdTs(m5dCs)asgscsusg | 356 | 428 |
| A-142893 | AGAGGTAGTTCTGGGAUGAC | 55 | asgsasgsgsdTsdAsdGsdTsdTs(m5dCs)dTsdGsdGsdGsasusgsasc | 357 | 439 |
| A-142894 | GGAGGATGTGCCAGAGGUAG | 56 | gsgsasgsgsdAsdTsdGsdTsdGs(m5dCs)(m5dCs)dAsdGsdAsgsgsusasg | 358 | 451 |
| A-142895 | CCUUUCATTTGGAGGAUGUG | 57 | cscsususus(m5dCs)dAsdTsdTsdTsdGsdGsdAsdGsdGsasusgsusg | 359 | 461 |
| A-142896 | ACCAAGTGAGTCCTTUCAUU | 58 | ascscsasasdGsdTsdGsdAsdGsdTs(m5dCs)(m5dCs)dTsdTsuscsasusu | 360 | 472 |
| A-142897 | GCUCCCAGAATTACCAAGUG | 59 | gscsuscscs(m5dCs)dAsdGsdAsdAsdTsdTsdAs(m5dCs)(m5dCs)asasgsusg | 361 | 484 |
| A-142898 | UAAUAAGATGGCTCCCAGAA | 60 | usasasusasdAsdGsdAsdTsdGsdGs(m5dCs)dTs(m5dCs)(m5dCs)csasgsasa | 362 | 494 |
| A-142899 | ACACCAAGGCATAATAAGAU | 61 | ascsascscsdAsdAsdGsdGs(m5dCs)dAsdTsdAsdAsdTsasasgsasu | 363 | 505 |
| A-142900 | AAUGUCAGTGCTACACCAAG | 62 | asasusgsus(m5dCs)dAsdGsdTsdGs(m5dCs)dTsdAs(m5dCs)dAscscsasasg | 364 | 517 |
| A-142901 | ACGGAAGATGAATGTCAGUG | 63 | ascsgsgsasdAsdGsdAsdTsdGsdAsdAsdTsdGsdTscsasgsusg | 365 | 527 |
| A-142902 | UCCCUTTTCTTAAACGGAAG | 64 | uscscscsusdTsdTsdTs(m5dCs)dTsdTsdAsdAsdAs(m5dCs)gsgsasasg | 366 | 540 |
| A-142903 | AUCCATCATTCTCCCUUUUC | 65 | asuscscsasdTs(m5dCs)dAsdTsdTs(m5dCs)dTs(m5dCs)(m5dCs)(m5dCs)usususus | 367 | 551 |
| | | | c | | |
| A-142904 | AUUUUTTCACATCCAUCAUU | 66 | asususususdTsdTs(m5dCs)dAs(m5dCs)dAsdTs(m5dCs)(m5dCs)dAsuscsasusu | 368 | 561 |
| A-142905 | UGGAUGCCACATTTTUUCAC | 67 | usgsgsasusdGs(m5dCs)(m5dCs)dAs(m5dCs)dAsdTsdTsdTsdTsususcsasc | 369 | 571 |
| A-142906 | AGUUUGTATCTTGGAUGCCA | 68 | asgsusususdGsdTsdAsdTs(m5dCs)dTsdTsdGsdGsdAsusgscscsa | 370 | 582 |
| A-142907 | CUUUGCTTCTTTGAGUUUGU | 69 | csusususgs(m5dCs)dTsdTs(m5dCs)dTsdTsdTsdGsdAsdGsusususgsu | 371 | 595 |
| A-142908 | AAUGUGTATCACTTTGCUUC | 70 | asasusgsusdGsdTsdAsdTs(m5dCs)dAs(m5dCs)dTsdTsdTsgscsususc | 372 | 606 |
| A-142909 | CGUCUCCTCCAAATGUGUAU | 71 | csgsuscsus(m5dCs)(m5dCs)dTs(m5dCs)(m5dCs)dAsdAsdAsdTsdGsusgsusasu | 373 | 617 |
| A-142910 | AUGCUGGATTACGTCUCCUC | 72 | asusgscsusdGsdGsdAsdTsdTsdAs(m5dCs)dGsdTs(m5dCs)uscscsusc | 374 | 628 |
| A-142911 | AGAAGTTCCAATGCTGGAUU | 73 | asgsasasgsdTsdTs(m5dCs)(m5dCs)dAsdAsdTsdGs(m5dCs)dTsgsgsasusu | 375 | 638 |
| A-142912 | UGCUUGAAGATCAGAAGUUC | 74 | usgscsususdGsdAsdAsdGsdAsdTs(m5dCs)dAsdGsdAsasgsususc | 376 | 650 |
| A-142913 | UGAGAATCCCTGCTTGAAGA | 75 | usgsasgsasdAsdTs(m5dCs)(m5dCs)(m5dCs)dTsdGs(m5dCs)dTsdTsgsasasgsa | 377 | 660 |
| A-142914 | AACCACAGGTTGAGAAUCCC | 76 | asascscsas(m5dCs)dAsdGsdGsdTsdTsdGsdAsdGsdAsasuscscsc | 378 | 670 |
| A-142915 | AUGAACCCCTAAACCACAGG | 77 | asusgsasas(m5dCs)(m5dCs)(m5dCs)(m5dCs)dTsdAsdAsdAs(m5dCs)(m5dCs)asc | 379 | 681 |
| | | | sasgsg | | |
| A-142916 | ACGCUCAGCCCCGATGAACC | 78 | ascsgscsus(m5dCs)dAsdGs(m5dCs)(m5dCs)(m5dCs)(m5dCs)dGsdAsdTsgsasascs | 380 | 694 |
| | | | c | | |
| A-142917 | UUCCUCTTGTCACGCUCAGC | 79 | ususcscsus(m5dCs)dTsdTsdGsdTs(m5dCs)dAs(m5dCs)dGs(m5dCs)uscsasgsc | 381 | 705 |
| A-142918 | GGCCCATTCCTTCCTCUUGU | 80 | gsgscscscsdAsdTsdTs(m5dCs)(m5dCs)dTsdTs(m5dCs)(m5dCs)dTscsususgsu | 382 | 715 |
| A-142919 | UGCAUCCCACGGGCCCAUUC | 81 | usgscsasus(m5dCs)(m5dCs)(m5dCs)dAs(m5dCs)dGsdGsdGs(m5dCs)(m5dCs)csa | 383 | 726 |
| | | | sususc | | |
| A-142920 | CCACATTGCCTGCATCCCAC | 82 | cscsascsasdTsdTsdGs(m5dCs)(m5dCs)dTsdGs(m5dCs)dAsdTscscscsasc | 384 | 736 |
| A-142921 | GCCUUTTAAGTCCCACAUUG | 83 | gscscsususdTsdTsdAsdAsdGsdTs(m5dCs)(m5dCs)(m5dCs)dAscsasususg | 385 | 748 |
| A-142922 | CAGUGCTTGGGCCTTUUAAG | 84 | csasgsusgs(m5dCs)dTsdTsdGsdGsdGs(m5dCs)(m5dCs)dTsdTsususasasg | 386 | 758 |
| A-142923 | GGUUCCATTTTCAGTGCUUG | 85 | gsgsususcs(m5dCs)dAsdTsdTsdTsdTs(m5dCs)dAsdGsdTsgscsususg | 387 | 769 |
| A-142924 | UGCUUTCGCCAGGTTCCAUU | 86 | usgscsususdTs(m5dCs)dGs(m5dCs)(m5dCs)dAsdGsdGsdTsdTscscsasusu | 388 | 780 |
| A-142925 | CAUUCTCCTCCTCTGCUUUC | 87 | csasususcsdTs(m5dCs)(m5dCs)dTs(m5dCs)(m5dCs)dTs(m5dCs)dTsdGscsususus | 389 | 793 |
| | | | c | | |
| A-142926 | CAUCUTTCTTCATTCUCCUC | 88 | csasuscsusdTsdTs(m5dCs)dTsdTs(m5dCs)dAsdTsdTs(m5dCs)uscscsusc | 390 | 803 |
| A-142927 | CCUGUTTGACTCCATCUUUC | 89 | cscsusgsusdTsdTsdGsdAs(m5dCs)dTs(m5dCs)(m5dCs)dAsdTscsusususc | 391 | 815 |
| A-142928 | CUCCAGGCTCCCTGTUUGAC | 90 | csuscscsasdGsdGs(m5dCs)dTs(m5dCs)(m5dCs)(m5dCs)dTsdGsdTsususgsasc | 392 | 825 |
| | | | csasasgsgsdTs(m5dCs)dTs(m5dCs)(m5dCs)(m5dCs)dTs(m5dCs)(m5dCs)dAsgsg | | |
| A-142929 | CAAGGTCTCCCTCCAGGCUC | 91 | scsusc | 393 | 835 |
| A-142930 | AUUUGAAAGTATCAAGGUCU | 92 | asusususgsdAsdAsdAsdGsdTsdAsdTs(m5dCs)dAsdAsgsgsuscsu | 394 | 847 |
| A-142931 | AGCCCCTCAGGCATTUGAAA | 93 | asgscscscs(m5dCs)dTs(m5dCs)dAsdGsdGs(m5dCs)dAsdTsdTsusgsasasa | 395 | 859 |
| A-142932 | AGGCGTCGATGAGCCCCUCA | 94 | asgsgscsgsdTs(m5dCs)dGsdAsdTsdGsdAsdGs(m5dCs)(m5dCs)cscsuscsa | 396 | 870 |
| A-142933 | CCCUGTCACAGGCGTCGAUG | 95 | cscscsusgsdTs(m5dCs)dAs(m5dCs)dAsdGsdGs(m5dCs)dGsdTscsgsasusg | 397 | 879 |
| | | | asasgsusasdTs(m5dCs)(m5dCs)dTsdTsdTs(m5dCs)dTs(m5dCs)(m5dCs)csusgsus | | |
| A-142934 | AAGUATCCTTTCTCCCUGUC | 96 | c | 398 | 892 |
| A-142935 | CUUGUTCAGAAGTATCCUUU | 97 | csususgsusdTs(m5dCs)dAsdGsdAsdAsdGsdTsdAsdTscscsususu | 399 | 901 |
| A-142936 | UGCUUGGAGGCTCCTUGUUC | 98 | usgscsususdGsdGsdAsdGsdGs(m5dCs)dTs(m5dCs)(m5dCs)dTsusgsususc | 400 | 914 |
| A-142937 | AAUGGATGATTTGCTUGGAG | 99 | asasusgsgsdAsdTsdGsdAsdTsdTsdTsdGs(m5dCs)dTsusgsgsasg | 401 | 925 |
| A-142938 | UAGGATGAGCAATGGAUGAU | 100 | usasgsgsasdTsdGsdAsdGs(m5dCs)dAsdAsdTsdGsdGsasusgsasu | 402 | 935 |
| A-142939 | AACCCGTCTTCCTAGGAUGA | 101 | asascscscsdGsdTs(m5dCs)dTsdTs(m5dCs)(m5dCs)dTsdAsdGsgsasusgsa | 403 | 947 |
| A-142940 | AGGGATTCTCAACCCGUCUU | 102 | asgsgsgsasdTsdTs(m5dCs)dTs(m5dCs)dAsdAs(m5dCs)(m5dCs)(m5dCs)gsuscsus | 404 | 957 |
| | | | u | | |
| A-142941 | ACCCUCAAATTAGGGAUUCU | 103 | ascscscsus(m5dCs)dAsdAsdAsdTsdTsdAsdGsdGsdGsasususcsu | 405 | 968 |
| A-142942 | GCAGGAACTGACCCTCAAAU | 104 | gscsasgsgsdAsdAs(m5dCs)dTsdGsdAs(m5dCs)(m5dCs)(m5dCs)dTscsasasasu | 406 | 978 |
| A-142943 | AAGGGCACTTCTGCAGGAAC | 105 | asasgsgsgs(m5dCs)dAs(m5dCs)dTsdTs(m5dCs)dTsdGs(m5dCs)dAsgsgsasasc | 407 | 990 |
| A-142944 | AGUGGAGGCAAAGGGCACU | 106 | asgsusgsgsdAsdGsdGs(m5dCs)dAsdAsdAsdGsdGsdGscsascsusu | 408 | 1000 |
| | U | | | | |
| A-142945 | AAUUGAGGCATTGAGUGGAG | 107 | asasususgsdAsdGsdGs(m5dCs)dAsdTsdTsdGsdAsdGsusgsgsasg | 409 | 1013 |
| A-142946 | CAGAAAACAAATTGAGGCAU | 108 | csasgsasasdAsdAs(m5dCs)dAsdAsdAsdTsdTsdGsdAsgsgscsasu | 410 | 1022 |
| A-142947 | ACUCUCAGTCATGCAGAAAA | 109 | ascsuscsus(m5dCs)dAsdGsdTs(m5dCs)dAsdTsdGs(m5dCs)dAsgsasasasa | 411 | 1035 |
| A-142948 | AACACTGAGACTCTCAGUCA | 110 | asascsascsdTsdGsdAsdGsdAs(m5dCs)dTs(m5dCs)dTs(m5dCs)asgsuscsa | 412 | 1044 |
| A-142949 | ACUGUCCCGTTCCAACACUG | 111 | ascsusgsus(m5dCs)(m5dCs)(m5dCs)dGsdTsdTs(m5dCs)(m5dCs)dAsdAscsascsus | 413 | 1057 |
| | | | g | | |
| A-142950 | AUACATAAATACTGTCCCGU | 112 | asusascsasdTsdAsdAsdAsdTsdAs(m5dCs)dTsdGsdTscscscsgsu | 414 | 1067 |
| A-142951 | AGGAAAAACTCATACAUAAA | 113 | asgsgsasasdAsdAsdAs(m5dCs)dTs(m5dCs)dAsdTsdAs(m5dCs)asusasasa | 415 | 1078 |
| A-142952 | CUCAAAATAAATAGGAAAAA | 114 | csuscsasasdAsdAsdTsdAsdAsdAsdTsdAsdGsdGsasasasasa | 416 | 1090 |
| A-142953 | ACCUCACAGACTCAAAAUAA | 115 | ascscsuscsdAs(m5dCs)dAsdGsdAs(m5dCs)dTs(m5dCs)dAsdAsasasusasa | 417 | 1100 |
| A-142954 | AUGACAAGAAGACCTCACAG | 116 | asusgsascsdAsdAsdGsdAsdAsdGsdAs(m5dCs)(m5dCs)dTscsascsasg | 418 | 1111 |
| A-142955 | AACCACACTCACATGACAAG | 117 | asascscsas(m5dCs)dAs(m5dCs)dTs(m5dCs)dAs(m5dCs)dAsdTsdGsascsasasg | 419 | 1123 |
| A-142956 | AAUCATTCACAACCACACUC | 118 | asasuscsasdTsdTs(m5dCs)dAs(m5dCs)dAsdAs(m5dCs)(m5dCs)dAscsascsusc | 420 | 1133 |
| A-142957 | AUCUUCAAAAGAAATCAUUC | 119 | asuscsusus(m5dCs)dAsdAsdAsdAsdGsdAsdAsdAsdTscsasususc | 421 | 1145 |
| A-142958 | ACUACAATATATCTTCAAAA | 120 | ascsusascsdAsdAsdTsdAsdTsdAsdTs(m5dCs)dTsdTscsasasasa | 422 | 1155 |
| A-142959 | AUUGUAACATCTACTACAAU | 121 | asususgsusdAsdAs(m5dCs)dAsdTs(m5dCs)dTsdAs(m5dCs)dTsascsasasu | 423 | 1167 |
| A-142960 | UGGCGACAAAATTGTAACAU | 122 | usgsgscsgsdAs(m5dCs)dAsdAsdAsdAsdTsdTsdGsdTsasascsasu | 424 | 1177 |
| A-142961 | AAGUUTAGTTTGGCGACAAA | 123 | asasgsususdTsdAsdGsdTsdTsdTsdGsdGs(m5dCs)dGsascsasasa | 425 | 1187 |
| A-142962 | AUCAUTAAGCAGCAAGUUUA | 124 | asuscsasusdTsdAsdAsdGs(m5dCs)dAsdGs(m5dCs)dAsdAsgsusususa | 426 | 1200 |
| A-142963 | GAUGUGAGCAAATCAUUAAG | 125 | gsasusgsusdGsdAsdGs(m5dCs)dAsdAsdAsdTs(m5dCs)dAsususasasg | 427 | 1211 |
| A-142964 | AUGUUTTACTAGATGUGAGC | 126 | asusgsususdTsdTsdAs(m5dCs)dTsdAsdGsdAsdTsdGsusgsasgsc | 428 | 1222 |
| A-142965 | ACAAATACTCCATGTUUUAC | 127 | ascsasasasdTsdAs(m5dCs)dTs(m5dCs)(m5dCs)dAsdTsdGsdTsusususasc | 429 | 1233 |
| A-142966 | AAGCACCTTACAAATACUCC | 128 | asasgscsas(m5dCs)(m5dCs)dTsdTsdAs(m5dCs)dAsdAsdAsdTsascsuscsc | 430 | 1242 |
| A-142967 | UAGAGGAGACCAAGCACCUU | 129 | usasgsasgsdGsdAsdGsdAs(m5dCs)(m5dCs)dAsdAsdGs(m5dCs)ascscsusu | 431 | 1253 |
| A-142968 | AUACUTGTAGTTATAGAGGA | 130 | asusascsusdTsdGsdTsdAsdGsdTsdTsdAsdTsdAsgsasgsgsa | 432 | 1266 |
| A-142969 | GCUUCCAATGTATACUUGUA | 131 | gscsususcs(m5dCs)dAsdAsdTsdGsdTsdAsdTsdAs(m5dCs)ususgsusa | 433 | 1277 |
| A-142970 | UUGAUCTTTATGCTTCCAAU | 132 | ususgsasus(m5dCs)dTsdTsdTsdAsdTsdGs(m5dCs)dTsdTscscsasasu | 434 | 1288 |
| A-142971 | ACCAACGGTTTGATCUUUAU | 133 | ascscsasas(m5dCs)dGsdGsdTsdTsdTsdGsdAsdTs(m5dCs)usususasu | 435 | 1297 |
| A-142972 | ACAUCCTATGCAACCAACGG | 134 | ascsasuscs(m5dCs)dTsdAsdTsdGs(m5dCs)dAsdAs(m5dCs)(m5dCs)asascsgsg | 436 | 1309 |
| A-142973 | AAAUAAAGGTGACATCCUAU | 135 | asasasusasdAsdAsdGsdGsdTsdGsdAs(m5dCs)dAsdTscscsusasu | 437 | 1320 |
| A-142974 | UAUUAATGGGTTAAAUAAAG | 136 | usasususasdAsdTsdGsdGsdGsdTsdTsdAsdAsdAsusasasasg | 438 | 1332 |
| A-142975 | UCAACCAGAGTATTAAUGGG | 137 | uscsasascs(m5dCs)dAsdGsdAsdGsdTsdAsdTsdTsdAsasusgsgsg | 439 | 1342 |
| A-142976 | AAUAAGATTAGGTCAACCAG | 138 | asasusasasdGsdAsdTsdTsdAsdGsdGsdTs(m5dCs)dAsascscsasg | 440 | 1354 |
| A-142977 | AGGUCTGAGAATAAGAUUAG | 139 | asgsgsuscsdTsdGsdAsdGsdAsdAsdTsdAsdAsdGsasususasg | 441 | 1363 |
| A-142978 | ACAGACACTTGAGGTCUGAG | 140 | ascsasgsas(m5dCs)dAs(m5dCs)dTsdTsdGsdAsdGsdGsdTscsusgsasg | 442 | 1374 |
| A-142979 | AACAGATACTGCACAGACAC | 141 | asascsasgsdAsdTsdAs(m5dCs)dTsdGs(m5dCs)dAs(m5dCs)dAsgsascsasc | 443 | 1386 |
| A-142980 | AUAUUTAAATGGAACAGAUA | 142 | asusasususdTsdAsdAsdAsdTsdGsdGsdAsdAs(m5dCs)asgsasusa | 444 | 1398 |
| A-142981 | UUGUAAAGCTGATATUUAAA | 143 | ususgsusasdAsdAsdGs(m5dCs)dTsdGsdAsdTsdAsdTsususasasa | 445 | 1409 |
| A-142982 | ACCACATAATTGTAAAGCUG | 144 | ascscsascsdAsdTsdAsdAsdTsdTsdGsdTsdAsdAsasgscsusg | 446 | 1418 |
| A-142983 | AUGUGTGTAGGCTACCACAU | 145 | asusgsusgsdTsdGsdTsdAsdGsdGs(m5dCs)dTsdAs(m5dCs)csascsasu | 447 | 1431 |
| A-142984 | AAAUGAGATTATGTGUGUAG | 146 | asasasusgsdAsdGsdAsdTsdTsdAsdTsdGsdTsdGsusgsusasg | 448 | 1441 |
| A-142985 | UUACAGCGATGAAATGAGAU | 147 | ususascsasdGs(m5dCs)dGsdAsdTsdGsdAsdAsdAsdTsgsasgsasu | 449 | 1452 |
| A-142986 | AACAGGGTGGTTACAGCGAU | 148 | asascsasgsdGsdGsdTsdGsdGsdTsdTsdAs(m5dCs)dAsgscsgsasu | 450 | 1462 |
| A-142987 | AGUGGTTATCACAACAGGGU | 149 | asgsusgsgsdTsdTsdAsdTs(m5dCs)dAs(m5dCs)dAsdAs(m5dCs)asgsgsgsu | 451 | 1474 |
| A-142988 | GGUAAAATAATAGTGGUUAU | 150 | gsgsusasasdAsdAsdTsdAsdAsdTsdAsdGsdTsdGsgsususasu | 452 | 1485 |
| A-142989 | AGCUGTACGATGGGTAAAAU | 151 | asgscsusgsdTsdAs(m5dCs)dGsdAsdTsdGsdGsdGsdTsasasasasu | 453 | 1497 |
| A-142990 | UUGCUTCCTCAGCTGUACGA | 152 | ususgscsusdTs(m5dCs)(m5dCs)dTs(m5dCs)dAsdGs(m5dCs)dTsdGsusascsgsa | 454 | 1507 |
| A-142991 | CUUAATCTGTTTGCTUCCUC | 153 | csususasasdTs(m5dCs)dTsdGsdTsdTsdTsdGs(m5dCs)dTsuscscsusc | 455 | 1517 |
| A-142992 | UGGGCAAGTTACTTAAUCUG | 154 | usgsgsgscsdAsdAsdGsdTsdTsdAs(m5dCs)dTsdTsdAsasuscsusg | 456 | 1528 |
| A-142993 | UAUUUACTGGTTTGGGCAAG | 155 | usasusususdAs(m5dCs)dTsdGsdGsdTsdTsdTsdGsdGsgscsasasg | 457 | 1540 |
| A-142994 | UGAGGTCTGCTATTTACUGG | 156 | usgsasgsgsdTs(m5dCs)dTsdGs(m5dCs)dTsdAsdTsdTsdTsascsusgsg | 458 | 1550 |
| A-142995 | GUGGGTGGCAGTCTGAGGUC | 157 | gsusgsgsgsdTsdGsdGs(m5dCs)dAsdGsdTs(m5dCs)dTsdGsasgsgsusc | 459 | 1563 |
| A-142996 | AAAAGGACAGTGGGTGGCAG | 158 | asasasasgsdGsdAs(m5dCs)dAsdGsdTsdGsdGsdGsdTsgsgscsasg | 460 | 1572 |
| A-142997 | AAAUUGTATTATAAAAGGAC | 159 | asasasususdGsdTsdAsdTsdTsdAsdTsdAsdAsdAsasgsgsasc | 461 | 1584 |
| A-142998 | AAUAUAGCTGTAAATUGUAU | 160 | asasusasusdAsdGs(m5dCs)dTsdGsdTsdAsdAsdAsdTsusgsusasu | 462 | 1595 |
| A-142999 | UGCUUAAAGTAAAATAUAGC | 161 | usgscsususdAsdAsdAsdGsdTsdAsdAsdAsdAsdTsasusasgsc | 463 | 1607 |
| A-143000 | AAUAAAAGAATTGCTUAAAG | 162 | asasusasasdAsdAsdGsdAsdAsdTsdTsdGs(m5dCs)dTsusasasasg | 464 | 1618 |
| A-143001 | AAUGGTTTTTGAATAAAAGA | 163 | asasusgsgsdTsdTsdTsdTsdTsdGsdAsdAsdTsdAsasasasgsa | 465 | 1629 |
| A-143002 | GCACUTAATAAATGGUUUUU | 164 | gscsascsusdTsdAsdAsdTsdAsdAsdAsdTsdGsdGsususususu | 466 | 1639 |
| A-14300 | AUAUUGCAAGGGCACUUAA | 165 | asusasususdGs(m5dCs)dAsdAsdGsdGsdGs(m5dCs)dAs(m5dCs)ususasasu | 467 | 1650 |
| 3 | U | | | | |
| A-143004 | ACAGCGATTGATATTGCAAG | 166 | ascsasgscsdGsdAsdTsdTsdGsdAsdTsdAsdTsdTsgscsasasg | 468 | 1660 |
| A-143005 | UUCAATGCCTGGCACAGCGA | 167 | ususcsasasdTsdGs(m5dCs)(m5dCs)dTsdGsdGs(m5dCs)dAs(m5dCs)asgscsgsa | 469 | 1673 |
| A-143006 | AUCUGTAGATTCAATGCCUG | 168 | asuscsusgsdTsdAsdGsdAsdTsdTs(m5dCs)dAsdAsdTsgscscsusg | 470 | 1682 |
| A-143007 | UGUCUTGCTCACATCUGUAG | 169 | usgsuscsusdTsdGs(m5dCs)dTs(m5dCs)dAs(m5dCs)dAsdTs(m5dCs)usgsusasg | 471 | 1694 |
| A-143008 | ACAGGTACTTTGTCTUGCUC | 170 | ascsasgsgsdTsdAs(m5dCs)dTsdTsdTsdGsdTs(m5dCs)dTsusgscsusc | 472 | 1704 |
| A-143009 | AGCUCCTTGAGGACAGGUAC | 171 | asgscsuscs(m5dCs)dTsdTsdGsdAsdGsdGsdAs(m5dCs)dAsgsgsusasc | 473 | 1716 |
| A-143010 | AUUAUACTATGAGCTCCUUG | 172 | asususasusdAs(m5dCs)dTsdAsdTsdGsdAsdGs(m5dCs)dTscscsususg | 474 | 1727 |
| A-143011 | UAAUCTCCTCATTATACUAU | 173 | usasasuscsdTs(m5dCs)(m5dCs)dTs(m5dCs)dAsdTsdTsdAsdTsascsusasu | 475 | 1737 |
| A-143012 | ACAUUTTCTTGTTAAUCUCC | 174 | ascsasususdTsdTs(m5dCs)dTsdTsdGsdTsdTsdAsdAsuscsuscsc | 476 | 1749 |
| A-143013 | AAUUGTAATAATACAUUUUC | 175 | asasususgsdTsdAsdAsdTsdAsdAsdTsdAs(m5dCs)dAsususususc | 477 | 1761 |
| A-143014 | ACACUGGACTAAATTGUAAU | 176 | ascsascsusdGsdGsdAs(m5dCs)dTsdAsdAsdAsdTsdTsgsusasasu | 478 | 1772 |
| A-143015 | UAUGCTATGACACTGGACUA | 177 | usasusgscsdTsdAsdTsdGsdAs(m5dCs)dAs(m5dCs)dTsdGsgsascsusa | 479 | 1781 |
| A-143016 | UCGCATCATCCTTATGCUAU | 178 | uscsgscsasdTs(m5dCs)dAsdTs(m5dCs)(m5dCs)dTsdTsdAsdTsgscsusasu | 480 | 1793 |
| A-143017 | GGUUUTCCCCTCGCAUCAUC | 179 | gsgsusususdTs(m5dCs)(m5dCs)(m5dCs)(m5dCs)dTs(m5dCs)dGs(m5dCs)dAsusc | 481 | 1803 |
| | | | sasusc | | |
| A-143018 | AACACTGCTCGGGTTUUCCC | 180 | asascsascsdTsdGs(m5dCs)dTs(m5dCs)dGsdGsdGsdTsdTsususcscsc | 482 | 1814 |
| A-143019 | CCUCCTCTTGGCAACACUGC | 181 | cscsuscscsdTs(m5dCs)dTsdTsdGsdGs(m5dCs)dAsdAs(m5dCs)ascsusgsc | 483 | 1826 |
| A-143020 | UGGCCTATTTCCTCCUCUUG | 182 | usgsgscscsdTsdAsdTsdTsdTs(m5dCs)(m5dCs)dTs(m5dCs)(m5dCs)uscsususg | 484 | 1836 |
| A-143021 | CCCAGACCACATTGGCCUAU | 183 | cscscsasgsdAs(m5dCs)(m5dCs)dAs(m5dCs)dAsdTsdTsdGsdGscscsusasu | 485 | 1848 |
| | | | asusasuscs(m5dCs)dAsdAs(m5dCs)(m5dCs)dGsdTs(m5dCs)(m5dCs)(m5dCs)asg | | |
| A-143022 | AUAUCCAACCGTCCCAGACC | 184 | sascsc | 486 | 1860 |
| A-143023 | GAUGUTTAAGTATATCCAAC | 185 | gsasusgsusdTsdTsdAsdAsdGsdTsdAsdTsdAsdTscscsasasc | 487 | 1871 |
| A-143024 | UGAUUATTAAGATGTUUAAG | 186 | usgsasususdAsdTsdTsdAsdAsdGsdAsdTsdGsdTsususasasg | 488 | 1881 |
| A-143025 | AAAAUTACTCTGATTAUUAA | 187 | asasasasusdTsdAs(m5dCs)dTs(m5dCs)dTsdGsdAsdTsdTsasususasa | 489 | 1891 |
| A-143026 | CUUUGTAAATGAAAAUUACU | 188 | csusususgsdTsdAsdAsdAsdTsdGsdAsdAsdAsdAsususascsu | 490 | 1902 |
| A-143027 | AGUACCGACCTCTCTUUGUA | 189 | asgsusascs(m5dCs)dGsdAs(m5dCs)(m5dCs)dTs(m5dCs)dTs(m5dCs)dTsususgsus | 491 | 1915 |
| | | | a | | |
| A-143028 | GGGUUATTTTAAGTACCGAC | 190 | gsgsgsususdAsdTsdTsdTsdTsdAsdAsdGsdTsdAscscsgsasc | 492 | 1926 |
| A-143029 | UAUUUTTCAGGGTTAUUUUA | 191 | usasusususdTsdTs(m5dCs)dAsdGsdGsdGsdTsdTsdAsususususa | 493 | 1935 |
| A-143030 | GAAUUCCAGTGTTATUUUUC | 192 | gsasasusus(m5dCs)(m5dCs)dAsdGsdTsdGsdTsdTsdAsdTsususususc | 494 | 1947 |
| A-143031 | UGCUAGAAAAGGAATUCCAG | 193 | usgscsusasdGsdAsdAsdAsdAsdGsdGsdAsdAsdTsuscscsasg | 495 | 1958 |
| A-143032 | AUAAATATAATGCTAGAAAA | 194 | asusasasasdTsdAsdTsdAsdAsdTsdGs(m5dCs)dTsdAsgsasasasa | 496 | 1968 |
| A-143033 | GGCAAATCAGGAATAAAUAU | 195 | gsgscsasasdAsdTs(m5dCs)dAsdGsdGsdAsdAsdTsdAsasasusasu | 497 | 1980 |
| A-143034 | AUAUGGCAAAGGCAAAUCA | 196 | asusasusgsdGs(m5dCs)dAsdAsdAsdGsdGs(m5dCs)dAsdAsasuscsasg | 498 | 1990 |
| | G | | | | |
| A-143035 | AGCAUTAGATTATATGGCAA | 197 | asgscsasusdTsdAsdGsdAsdTsdTsdAsdTsdAsdTsgsgscsasa | 499 | 2001 |
| A-143036 | ACUAUATAAACAAGCAUUAG | 198 | ascsusasusdAsdTsdAsdAsdAs(m5dCs)dAsdAsdGs(m5dCs)asususasg | 500 | 2013 |
| A-143037 | AAUACCAGACACTATAUAAA | 199 | asasusascs(m5dCs)dAsdGsdAs(m5dCs)dAs(m5dCs)dTsdAsdTsasusasasa | 501 | 2023 |
| A-143038 | AGAACTGTTAAACAAUACCA | 200 | asgsasascsdTsdGsdTsdTsdAsdAsdAs(m5dCs)dAsdAsusascscsa | 502 | 2036 |
| A-143039 | AGAAAAGACAGAACTGUUAA | 201 | asgsasasasdAsdGsdAs(m5dCs)dAsdGsdAsdAs(m5dCs)dTsgsususasa | 503 | 2045 |
| A-143040 | GUGGCATTTAAATAGAAAAG | 202 | gsusgsgscsdAsdTsdTsdTsdAsdAsdAsdTsdAsdGsasasasasg | 504 | 2058 |
| A-143041 | UAAAATTTAGTGGCAUUUAA | 203 | usasasasasdTsdTsdTsdAsdGsdTsdGsdGs(m5dCs)dAsusususasa | 505 | 2067 |
| A-143042 | AGGUATGAATTTAAAAUUUA | 204 | asgsgsusasdTsdGsdAsdAsdTsdTsdTsdAsdAsdAsasusususa | 506 | 2078 |
| A-143043 | UGAAUCATGGAAAGGUAUG | 205 | usgsasasus(m5dCs)dAsdTsdGsdGsdAsdAsdAsdGsdGsusasusgsa | 507 | 2090 |
| | A | | | | |
| A-143044 | UUUUGAATTTTGAATCAUGG | 206 | ususususgsdAsdAsdTsdTsdTsdTsdGsdAsdAsdTscsasusgsg | 508 | 2100 |
| A-143045 | UCCCATGGGATCTTTUGAAU | 207 | uscscscsasdTsdGsdGsdGsdAsdTs(m5dCs)dTsdTsdTsusgsasasu | 509 | 2112 |
| A-143046 | UUCCAACCATCTCCCAUGGG | 208 | ususcscsasdAs(m5dCs)(m5dCs)dAsdTs(m5dCs)dTs(m5dCs)(m5dCs)(m5dCs)asu | 510 | 2123 |
| | | | sgsgsg | | |
| A-143047 | AGUGGAGATTTTCCAACCAU | 209 | asgsusgsgsdAsdGsdAsdTsdTsdTsdTs(m5dCs)(m5dCs)dAsascscsasu | 511 | 2133 |
| A-143048 | UUGGAGGATGAAGTGGAGAU | 210 | ususgsgsasdGsdGsdAsdTsdGsdAsdAsdGsdTsdGsgsasgsasu | 512 | 2144 |
| A-143049 | ACUUGAATGGCTTGGAGGAU | 211 | ascsususgsdAsdAsdTsdGsdGs(m5dCs)dTsdTsdGsdGsasgsgsasu | 513 | 2155 |
| A-143050 | UCUGGAAAGGAAACTUGAAU | 212 | uscsusgsgsdAsdAsdAsdGsdGsdAsdAsdAs(m5dCs)dTsusgsasasu | 514 | 2167 |
| A-143051 | GUAGCAGTTGCTTCTGGAAA | 213 | gsusasgscsdAsdGsdTsdTsdGs(m5dCs)dTsdTs(m5dCs)dTsgsgsasasa | 515 | 2179 |
| A-143052 | AUGAAAGGCAGTAGCAGUUG | 214 | asusgsasasdAsdGsdGs(m5dCs)dAsdGsdTsdAsdGs(m5dCs)asgsususg | 516 | 2189 |
| A-143053 | AAGAACATATGAATGAAAGG | 215 | asasgsasas(m5dCs)dAsdTsdAsdTsdGsdAsdAsdTsdGsasasasgsg | 517 | 2201 |
| A-143054 | CUAUCTTTAGAAGAACAUAU | 216 | csusasuscsdTsdTsdTsdAsdGsdAsdAsdGsdAsdAscsasusasu | 518 | 2211 |
| A-143055 | CCAAATGTAGACTATCUUUA | 217 | cscsasasasdTsdGsdTsdAsdGsdAs(m5dCs)dTsdAsdTscsusususa | 519 | 2222 |
| A-143056 | ACAUACATTTCCAAAUGUAG | 218 | ascsasusas(m5dCs)dAsdTsdTsdTs(m5dCs)(m5dCs)dAsdAsdAsusgsusasg | 520 | 2232 |
| A-143057 | ACGUGCTTTTAACATACAUU | 219 | ascsgsusgs(m5dCs)dTsdTsdTsdTsdAsdAs(m5dCs)dAsdTsascsasusu | 521 | 2243 |
| A-143058 | AUUUUAAAAATACGTGCUUU | 220 | asususususdAsdAsdAsdAsdAsdTsdAs(m5dCs)dGsdTsgscsususu | 522 | 2254 |
| A-143059 | UUAGGAAAAAAATTTUAAAA | 221 | ususasgsgsdAsdAsdAsdAsdAsdAsdAsdTsdTsdTsusasasasa | 523 | 2265 |
| A-143060 | AUGUGTTACTATTTAGGAAA | 222 | asusgsusgsdTsdTsdAs(m5dCs)dTsdAsdTsdTsdTsdAsgsgsasasa | 524 | 2277 |
| A-143061 | GCAGACATACAATGTGUUAC | 223 | gscsasgsas(m5dCs)dAsdTsdAs(m5dCs)dAsdAsdTsdGsdTsgsususasc | 525 | 2288 |
| A-143062 | AAAGUACACAGCAGACAUAC | 224 | asasasgsusdAs(m5dCs)dAs(m5dCs)dAsdGs(m5dCs)dAsdGsdAscsasusasc | 526 | 2298 |
| A-143063 | AAAUAAAAATAGCAAAGUAC | 225 | asasasusasdAsdAsdAsdAsdTsdAsdGs(m5dCs)dAsdAsasgsusasc | 527 | 2311 |
| A-143064 | ACACUAAAATAAATAAAAAU | 226 | ascsascsusdAsdAsdAsdAsdTsdAsdAsdAsdTsdAsasasasasu | 528 | 2321 |
| A-143065 | CUAUATAAGAAACACUAAAA | 227 | csusasusasdTsdAsdAsdGsdAsdAsdAs(m5dCs)dAs(m5dCs)usasasasa | 529 | 2332 |
| A-143066 | CAUUCCATCTGCTATAUAAG | 228 | csasususcs(m5dCs)dAsdTs(m5dCs)dTsdGs(m5dCs)dTsdAsdTsasusasasg | 530 | 2343 |
| A-143067 | ACUUCAAATTCATTCCAUCU | 229 | ascsususcsdAsdAsdAsdTsdTs(m5dCs)dAsdTsdTs(m5dCs)csasuscsu | 531 | 2353 |
| A-143068 | CAGCCCTGGGAACTTCAAAU | 230 | csasgscscs(m5dCs)dTsdGsdGsdGsdAsdAs(m5dCs)dTsdTscsasasasu | 532 | 2364 |
| A-143069 | GCAUGGATCCTCAGCCCUGG | 231 | gscsasusgsdGsdAsdTs(m5dCs)(m5dCs)dTs(m5dCs)dAsdGs(m5dCs)cscsusgsg | 533 | 2375 |
| A-143070 | AAACAAAGAAGGCATGGAUC | 232 | asasascsasdAsdAsdGsdAsdAsdGsdGs(m5dCs)dAsdTsgsgsasusc | 534 | 2386 |
| A-143071 | AAGAUAACTTAGAAACAAAG | 233 | asasgsasusdAsdAs(m5dCs)dTsdTsdAsdGsdAsdAsdAscsasasasg | 535 | 2398 |
| A-143072 | AAAGCTATGGGAAAGAUAAC | 234 | asasasgscsdTsdAsdTsdGsdGsdGsdAsdAsdAsdGsasusasasc | 536 | 2410 |
| A-143073 | AAAGATAATGAAAAGCUAUG | 235 | asasasgsasdTsdAsdAsdTsdGsdAsdAsdAsdAsdGscsusasusg | 537 | 2421 |
| A-143074 | UGGAUCATATGAAAGAUAAU | 236 | usgsgsasus(m5dCs)dAsdTsdAsdTsdGsdAsdAsdAsdGsasusasasu | 538 | 2432 |
| A-143075 | UAACATATACTGGATCAUAU | 237 | usasascsasdTsdAsdTsdAs(m5dCs)dTsdGsdGsdAsdTscsasusasu | 539 | 2442 |
| A-143076 | AGGACATATTTAACAUAUAC | 238 | asgsgsascsdAsdTsdAsdTsdTsdTsdAsdAs(m5dCs)dAsusasusasc | 540 | 2452 |
| A-143077 | AAUGUATATGTAGGACAUAU | 239 | asasusgsusdAsdTsdAsdTsdGsdTsdAsdGsdGsdAscsasusasu | 541 | 2463 |
| A-143078 | GUGGUTGTCTAAATGUAUAU | 240 | gsusgsgsusdTsdGsdTs(m5dCs)dTsdAsdAsdAsdTsdGsusasusasu | 542 | 2474 |
| A-143079 | CUUAACAAATGGTGGUUGUC | 241 | csususasas(m5dCs)dAsdAsdAsdTsdGsdGsdTsdGsdGsususgsusc | 543 | 2485 |
| A-143080 | UAGAGCAAATACTTAACAAA | 242 | usasgsasgs(m5dCs)dAsdAsdAsdTsdAs(m5dCs)dTsdTsdAsascsasasa | 544 | 2496 |
| A-143081 | AAACUCTGTCCTAGAGCAAA | 243 | asasascsus(m5dCs)dTsdGsdTs(m5dCs)(m5dCs)dTsdAsdGsdAsgscsasasa | 545 | 2507 |
| A-143082 | AUAAACAAATCCAAACUCUG | 244 | asusasasas(m5dCs)dAsdAsdAsdTs(m5dCs)(m5dCs)dAsdAsdAscsuscsusg | 546 | 2519 |
| A-143083 | UUUGAGCAAACATAAACAAA | 245 | usususgsasdGs(m5dCs)dAsdAsdAs(m5dCs)dAsdTsdAsdAsascsasasa | 547 | 2530 |
| A-143084 | UGGGUCTCCTTTTGAGCAAA | 246 | usgsgsgsus(m5dCs)dTs(m5dCs)(m5dCs)dTsdTsdTsdTsdGsdAsgscsasasa | 548 | 2540 |
| A-143085 | CUGGAGAGCCCATGGGUCUC | 247 | csusgsgsasdGsdAsdGs(m5dCs)(m5dCs)(m5dCs)dAsdTsdGsdGsgsuscsusc | 549 | 2552 |
| A-143086 | ACUCAGTGCACCCTGGAGAG | 248 | ascsuscsasdGsdTsdGs(m5dCs)dAs(m5dCs)(m5dCs)(m5dCs)dTsdGsgsasgsasg | 550 | 2564 |
| A-143087 | GGACUAGATTGACTCAGUGC | 249 | gsgsascsusdAsdGsdAsdTsdTsdGsdAs(m5dCs)dTs(m5dCs)asgsusgsc | 551 | 2575 |
| A-143088 | AUUGCTTTTTAGGACUAGAU | 250 | asususgscsdTsdTsdTsdTsdTsdAsdGsdGsdAs(m5dCs)usasgsasu | 552 | 2586 |
| A-143089 | AAUAATAAGATTGCTUUUUA | 251 | asasusasasdTsdAsdAsdGsdAsdTsdTsdGs(m5dCs)dTsususususa | 553 | 2595 |
| A-143090 | CAUACAGAGTTAATAAUAAG | 252 | csasusascsdAsdGsdAsdGsdTsdTsdAsdAsdTsdAsasusasasg | 554 | 2606 |
| A-143091 | ACAUGATTCTGTCATACAGA | 253 | ascsasusgsdAsdTsdTs(m5dCs)dTsdGsdTs(m5dCs)dAsdTsascsasgsa | 555 | 2618 |
| A-143092 | AAAAGTTCCAGACATGAUUC | 254 | asasasasgsdTsdTs(m5dCs)(m5dCs)dAsdGsdAs(m5dCs)dAsdTsgsasususc | 556 | 2629 |
| A-143093 | AAGCAGAAAACAAAAGUUCC | 255 | asasgscsasdGsdAsdAsdAsdAs(m5dCs)dAsdAsdAsdAsgsususcsc | 557 | 2640 |
| A-143094 | AUACUTGACAGAAAGCAGAA | 256 | asusascsusdTsdGsdAs(m5dCs)dAsdGsdAsdAsdAsdGscsasgsasa | 558 | 2652 |
| A-143095 | AAGUGAAGTTTATACUUGAC | 257 | asasgsusgsdAsdAsdGsdTsdTsdTsdAsdTsdAs(m5dCs)ususgsasc | 559 | 2663 |
| A-143096 | ACAGCATCAAAGTGAAGUUU | 258 | ascsasgscsdAsdTs(m5dCs)dAsdAsdAsdGsdTsdGsdAsasgsususu | 560 | 2672 |
| A-143097 | UGAUUTTGCAAGTACAGCAU | 259 | usgsasususdTsdTsdGs(m5dCs)dAsdAsdGsdTsdAs(m5dCs)asgscsasu | 561 | 2685 |
| A-143098 | AAGAAAATGTGATTTUGCAA | 260 | asasgsasasdAsdAsdTsdGsdTsdGsdAsdTsdTsdTsusgscsasa | 562 | 2694 |
| A-143099 | CGGAATTTCCAGAAAGAAAA | 261 | csgsgsasasdTsdTsdTs(m5dCs)(m5dCs)dAsdGsdAsdAsdAsgsasasasa | 563 | 2707 |
| A-143100 | AGGUACACTGCCGGAAUUUC | 262 | asgsgsusas(m5dCs)dAs(m5dCs)dTsdGs(m5dCs)(m5dCs)dGsdGsdAsasusususc | 564 | 2718 |
| A-143101 | UAGCAGTCAAGGTACACUGC | 263 | usasgscsasdGsdTs(m5dCs)dAsdAsdGsdGsdTsdAs(m5dCs)ascsusgsc | 565 | 2727 |
| A-143102 | GCACAGGGTAGCTAGCAGUC | 264 | gscsascsasdGsdGsdGsdTsdAsdGs(m5dCs)dTsdAsdGscsasgsusc | 566 | 2739 |
| A-143103 | AGGCUTTTCTGGCACAGGGU | 265 | asgsgscsusdTsdTsdTs(m5dCs)dTsdGsdGs(m5dCs)dAs(m5dCs)asgsgsgsu | 567 | 2750 |
| A-143104 | CACAACGAATGAGGCUUUUC | 266 | csascsasas(m5dCs)dGsdAsdAsdTsdGsdAsdGsdGs(m5dCs)ususususc | 568 | 2761 |
| A-143105 | AGGGUTCAAGCACAACGAAU | 267 | asgsgsgsusdTs(m5dCs)dAsdAsdGs(m5dCs)dAs(m5dCs)dAsdAscsgsasasu | 569 | 2771 |
| A-143106 | GGUGGCATTCAAGGGUUCAA | 268 | gsgsusgsgs(m5dCs)dAsdTsdTs(m5dCs)dAsdAsdGsdGsdGsususcsasa | 570 | 2782 |
| A-143107 | AGUGATGACAGCTGGUGGCA | 269 | asgsusgsasdTsdGsdAs(m5dCs)dAsdGs(m5dCs)dTsdGsdGsusgsgscsa | 571 | 2795 |
| A-143108 | AGGGCTGTGTAGTGAUGACA | 270 | asgsgsgscsdTsdGsdTsdGsdTsdAsdGsdTsdGsdAsusgsascsa | 572 | 2805 |
| A-143109 | AGCCUCTTAGGAGGGCUGUG | 271 | asgscscsus(m5dCs)dTsdTsdAsdGsdGsdAsdGsdGsdGscsusgsusg | 573 | 2816 |
| A-143110 | ACCUCCAGGAAGCCTCUUAG | 272 | ascscsuscs(m5dCs)dAsdGsdGsdAsdAsdGs(m5dCs)(m5dCs)dTscsususasg | 574 | 2826 |
| A-143111 | CUGAATCTCGAAACCUCCAG | 273 | csusgsasasdTs(m5dCs)dTs(m5dCs)dGsdAsdAsdAs(m5dCs)(m5dCs)uscscsasg | 575 | 2838 |
| A-143112 | UCCCAGGGCATCTGAAUCUC | 274 | uscscscsasdGsdGsdGs(m5dCs)dAsdTs(m5dCs)dTsdGsdAsasuscsusc | 576 | 2849 |
| A-143113 | CUCUGGGATCTCCCAGGGCA | 275 | csuscsusgsdGsdGsdAsdTs(m5dCs)dTs(m5dCs)(m5dCs)(m5dCs)dAsgsgsgscsa | 577 | 2859 |
| A-143114 | GGGAAAGGAAACTCTGGGAU | 276 | gsgsgsasasdAsdGsdGsdAsdAsdAs(m5dCs)dTs(m5dCs)dTsgsgsgsasu | 578 | 2870 |
| A-143115 | AAUAUGGCCAAGAGGGAAA | 277 | asasusasusdGsdGs(m5dCs)(m5dCs)dAsdAsdGsdAsdGsdGsgsasasasg | 579 | 2883 |
| | G | | | | |
| A-143116 | AUUGACACCAGAATAUGGCC | 278 | asususgsas(m5dCs)dAs(m5dCs)(m5dCs)dAsdGsdAsdAsdTsdAsusgsgscsc | 580 | 2894 |
| A-143117 | ACUCCTTGTCATTGACACCA | 279 | ascsuscscsdTsdTsdGsdTs(m5dCs)dAsdTsdTsdGsdAscsascscsa | 581 | 2904 |
| A-143118 | AAGCCAAGGTACTCCUUGUC | 280 | asasgscscsdAsdAsdGsdGsdTsdAs(m5dCs)dTs(m5dCs)(m5dCs)ususgsusc | 582 | 2914 |
| A-143119 | UGACATGTGGCAAAGCCAAG | 281 | usgsascsasdTsdGsdTsdGsdGs(m5dCs)dAsdAsdAsdGscscsasasg | 583 | 2926 |
| A-143120 | UCUUCAGCCTTGACAUGUGG | 282 | uscsususcsdAsdGs(m5dCs)(m5dCs)dTsdTsdGsdAs(m5dCs)dAsusgsusgsg | 584 | 2936 |
| A-143121 | GGAGACACTGTTTCTUCAGC | 283 | gsgsasgsas(m5dCs)dAs(m5dCs)dTsdGsdTsdTsdTs(m5dCs)dTsuscsasgsc | 585 | 2948 |
| A-143122 | AGGAGCTCTGTTGGAGACAC | 284 | asgsgsasgs(m5dCs)dTs(m5dCs)dTsdGsdTsdTsdGsdGsdAsgsascsasc | 586 | 2960 |
| A-143123 | AGAUAACACAAGGAGCUCUG | 285 | asgsasusasdAs(m5dCs)dAs(m5dCs)dAsdAsdGsdGsdAsdGscsuscsusg | 587 | 2970 |
| A-143124 | ACAUGTACAAACAGAUAACA | 286 | ascsasusgsdTsdAs(m5dCs)dAsdAsdAs(m5dCs)dAsdGsdAsusasascsa | 588 | 2982 |
| A-143125 | UACAAATGCACATGTACAAA | 287 | usascsasasdAsdTsdGs(m5dCs)dAs(m5dCs)dAsdTsdGsdTsascsasasa | 589 | 2991 |
| A-143126 | ACACCAATTACTGTACAAAU | 288 | ascsascscsdAsdAsdTsdTsdAs(m5dCs)dTsdGsdTsdAscsasasasu | 590 | 3004 |
| A-143127 | AACACTGTCACACCAAUUAC | 289 | asascsascsdTsdGsdTs(m5dCs)dAs(m5dCs)dAs(m5dCs)(m5dCs)dAsasususasc | 591 | 3013 |
| A-143128 | AUUCACACAAAGAACACUGU | 290 | asususcsas(m5dCs)dAs(m5dCs)dAsdAsdAsdGsdAsdAs(m5dCs)ascsusgsu | 592 | 3025 |
| A-143129 | CUUGCCTGTAATTCACACAA | 291 | csususgscs(m5dCs)dTsdGsdTsdAsdAsdTsdTs(m5dCs)dAscsascsasa | 593 | 3035 |
| A-143130 | UCAGCCACAATTCTTGCCUG | 292 | uscsasgscs(m5dCs)dAs(m5dCs)dAsdAsdTsdTs(m5dCs)dTsdTsgscscsusg | 594 | 3047 |
| A-143131 | UAUGUGCCTTGCTCAGCCAC | 293 | usasusgsusdGs(m5dCs)(m5dCs)dTsdTsdGs(m5dCs)dTs(m5dCs)dAsgscscsasc | 595 | 3059 |
| A-143132 | CUGAGTAGACTATGTGCCUU | 294 | csusgsasgsdTsdAsdGsdAs(m5dCs)dTsdAsdTsdGsdTsgscscsusu | 596 | 3069 |
| A-143133 | CUUAGGAATAGACTGAGUAG | 295 | csususasgsdGsdAsdAsdTsdAsdGsdAs(m5dCs)dTsdGsasgsusasg | 597 | 3081 |
| A-143134 | AGGAGTTAGGACTTAGGAAU | 296 | asgsgsasgsdTsdTsdAsdGsdGsdAs(m5dCs)dTsdTsdAsgsgsasasu | 598 | 3092 |
| A-143135 | ACACCACAAGGAGGAGUUAG | 297 | ascsascscsdAs(m5dCs)dAsdAsdGsdGsdAsdGsdGsdAsgsususasg | 599 | 3103 |
| A-143136 | UACAAATCCAACACCACAAG | 298 | usascsasasdAsdTs(m5dCs)(m5dCs)dAsdAs(m5dCs)dAs(m5dCs)(m5dCs)ascsasas | 600 | 3113 |
| | | | g | | |
| A-143137 | AUAAAGTGCCTTACAAAUCC | 299 | asusasasasdGsdTsdGs(m5dCs)(m5dCs)dTsdTsdAs(m5dCs)dAsasasuscsc | 601 | 3124 |
| A-143138 | AGACAAAAGGGATAAAGUGC | 300 | asgsascsasdAsdAsdAsdGsdGsdGsdAsdTsdAsdAsasgsusgsc | 602 | 3135 |
| A-143139 | GAUGAAACATGAGACAAAAG | 301 | gsasusgsasdAsdAs(m5dCs)dAsdTsdGsdAsdGsdAs(m5dCs)asasasasg | 603 | 3146 |
| A-143140 | UAUGCCATTTACGATGAAAC | 302 | usasusgscs(m5dCs)dAsdTsdTsdTsdAs(m5dCs)dGsdAsdTsgsasasasc | 604 | 3158 |
| A-143141 | AUCUCTGCCTATGCCAUUUA | 303 | asuscsuscsdTsdGs(m5dCs)(m5dCs)dTsdAsdTsdGs(m5dCs)(m5dCs)asusususa | 605 | 3167 |
| A-143142 | AGAAUTAGGTATCATCUCUG | 304 | asgsasasusdTsdAsdGsdGsdTsdAsdTs(m5dCs)dAsdTscsuscsusg | 606 | 3180 |
| A-143143 | AAUCAAATGCAGAATUAGGU | 305 | asasuscsasdAsdAsdTsdGs(m5dCs)dAsdGsdAsdAsdTsusasgsgsu | 607 | 3190 |
| A-143144 | ACAAAAAGTGACAATCAAAU | 306 | ascsasasasdAsdAsdGsdTsdGsdAs(m5dCs)dAsdAsdTscsasasasu | 608 | 3202 |
| A-143145 | AAUGCAGGTACAAAAAGUGA | 307 | asasusgscsdAsdGsdGsdTsdAs(m5dCs)dAsdAsdAsdAsasgsusgsa | 609 | 3211 |
| A-143146 | AUUUUATTAAATTAAUGCAG | 308 | asususususdAsdTsdTsdAsdAsdAsdTsdTsdAsdAsusgscsasg | 610 | 3224 |
| A-143147 | AAAUAAGAATATTTTAUUAA | 309 | asasasusasdAsdGsdAsdAsdTsdAsdTsdTsdTsdTsasususasa | 611 | 3234 |
| A-143148 | GUAACAAAATAAATAAGAAU | 310 | gsusasascsdAsdAsdAsdAsdTsdAsdAsdAsdTsdAsasgsasasu | 612 | 3244 |
| A-143149 | UGGUGTACCAAGTAACAAAA | 311 | usgsgsusgsdTsdAs(m5dCs)(m5dCs)dAsdAsdGsdTsdAsdAscsasasasa | 613 | 3255 |
| A-143150 | AAAUGGACATGCTGGUGUAC | 312 | asasasusgsdGsdAs(m5dCs)dAsdTsdGs(m5dCs)dTsdGsdGsusgsusasc | 614 | 3267 |
| A-143151 | AAAUAAACAAGAAAAUGGA | 313 | asasasusasdAsdAs(m5dCs)dAsdAsdGsdAsdAsdAsdAsusgsgsasc | 615 | 3279 |
| | C | | | | |
| A-143152 | UUAAACACAAAATAAACAAG | 314 | ususasasas(m5dCs)dAs(m5dCs)dAsdAsdAsdAsdTsdAsdAsascsasasg | 616 | 3288 |
| A-143153 | CUGAACATTTTATTAAACAC | 315 | csusgsasas(m5dCs)dAsdTsdTsdTsdTsdAsdTsdTsdAsasascsasc | 617 | 3300 |
| A-143154 | UGGGATGTTAAACTGAACAU | 316 | usgsgsgsasdTsdGsdTsdTsdAsdAsdAs(m5dCs)dTsdGsasascsasu | 618 | 3312 |
| A-143155 | CUUUCTCCACTGGGAUGUUA | 317 | csusususcsdTs(m5dCs)(m5dCs)dAs(m5dCs)dTsdGsdGsdGsdAsusgsususa | 619 | 3322 |

TABLE 4
Single dose screen in Hepa1-6 cells

| | Position in | | |
|---|---|---|---|
| Oligo Name | NM_001267706.1 | Avg 10 nM | SD |
| A-142854 | 10 | 27.8 | 0.8 |
| A-142855 | 23 | 56.0 | 5.5 |
| A-142856 | 34 | 63.4 | 1.6 |
| A-142857 | 44 | 29.4 | 4.9 |
| A-142858 | 56 | 31.7 | 5.9 |
| A-142859 | 65 | 53.4 | 1.2 |
| A-142860 | 78 | 37.4 | 3.5 |
| A-142861 | 89 | 28.5 | 3.5 |
| A-142862 | 99 | 39.9 | 3.9 |
| A-142863 | 109 | 25.4 | 2.3 |
| A-142864 | 122 | 34.5 | 4.6 |
| A-142865 | 132 | 45.1 | 6.0 |
| A-142866 | 144 | 22.9 | 1.0 |
| A-142867 | 154 | 51.7 | 4.5 |
| A-142868 | 165 | 95.3 | 8.1 |
| A-142869 | 175 | 104.9 | 14.5 |
| A-142870 | 187 | 31.0 | 2.8 |
| A-142871 | 199 | 26.7 | 2.9 |
| A-142872 | 210 | 35.3 | 3.9 |
| A-142873 | 221 | 41.4 | 3.4 |
| A-142874 | 231 | 32.9 | 4.0 |
| A-142875 | 243 | 69.3 | 6.1 |
| A-142876 | 252 | 49.1 | 3.5 |
| A-142877 | 263 | 59.9 | 1.7 |
| A-142878 | 275 | 41.4 | 2.7 |
| A-142879 | 286 | 19.9 | 2.8 |
| A-142880 | 296 | 51.7 | 3.7 |
| A-142881 | 309 | 47.1 | 4.7 |
| A-142882 | 318 | 29.1 | 0.9 |
| A-142883 | 330 | 46.7 | 2.1 |
| A-142884 | 341 | 54.7 | 6.5 |
| A-142885 | 351 | 41.8 | 2.3 |
| A-142886 | 363 | 43.2 | 4.2 |
| A-142887 | 375 | 49.7 | 3.3 |
| A-142888 | 384 | 66.7 | 1.1 |
| A-142889 | 395 | 29.9 | 2.1 |
| A-142890 | 406 | 47.2 | 6.5 |
| A-142891 | 418 | 45.8 | 3.0 |
| A-142892 | 428 | 25.0 | 3.2 |
| A-142893 | 439 | 78.5 | 11.1 |
| A-142894 | 451 | 43.0 | 6.5 |
| A-142895 | 461 | 54.5 | 8.8 |
| A-142896 | 472 | 49.4 | 5.2 |
| A-142897 | 484 | 29.6 | 4.1 |
| A-142898 | 494 | 79.6 | 13.3 |
| A-142899 | 505 | 48.1 | 3.6 |
| A-142900 | 517 | 35.1 | 9.8 |
| A-142901 | 527 | 58.9 | 5.5 |
| A-142902 | 540 | 37.6 | 2.5 |
| A-142903 | 551 | 37.2 | 8.6 |
| A-142904 | 561 | 75.7 | 4.2 |
| A-142905.1 | 571 | 49.2 | 6.0 |
| A-142906.1 | 582 | 57.4 | 6.4 |
| A-142907.1 | 595 | 60.4 | 3.1 |
| A-142908.1 | 606 | 37.4 | 4.9 |
| A-142909.1 | 617 | 49.3 | 6.3 |
| A-142910.1 | 628 | 40.4 | 3.4 |
| A-142911.1 | 638 | 55.5 | 3.9 |
| A-142912.1 | 650 | 68.1 | 7.0 |
| A-142913.1 | 660 | 112.2 | 14.4 |
| A-142914.1 | 670 | 60.5 | 5.9 |
| A-142915.1 | 681 | 34.7 | 4.9 |
| A-142916.1 | 694 | 45.0 | 4.6 |
| A-142917.1 | 705 | 34.3 | 6.2 |
| A-142918.1 | 715 | 38.5 | 3.6 |
| A-142919.1 | 726 | 41.3 | 7.9 |
| A-142920.1 | 736 | 30.2 | 3.2 |
| A-142921.1 | 748 | 50.5 | 9.7 |
| A-142922.1 | 758 | 53.2 | 5.8 |
| A-142923.1 | 769 | 38.1 | 3.0 |
| A-142924.1 | 780 | 59.2 | 3.6 |
| A-142925.1 | 793 | 40.7 | 4.8 |
| A-142926.1 | 803 | 58.3 | 4.5 |
| A-142927.1 | 815 | 48.7 | 6.4 |
| A-142928.1 | 825 | 55.9 | 5.8 |
| A-142929.1 | 835 | 67.8 | 3.9 |
| A-142930.1 | 847 | 75.0 | 4.4 |
| A-142931.1 | 859 | 43.7 | 7.5 |
| A-142932 | 870 | 27.4 | 4.6 |
| A-142933 | 879 | 29.2 | 1.7 |
| A-142934 | 892 | 37.8 | 4.3 |
| A-142935 | 901 | 78.0 | 9.7 |
| A-142936 | 914 | 73.9 | 10.0 |
| A-142937 | 925 | 63.1 | 5.7 |
| A-142938 | 935 | 82.7 | 4.4 |
| A-142939 | 947 | 63.4 | 1.9 |
| A-142940 | 957 | 71.1 | 7.2 |
| A-142941 | 968 | 73.5 | 5.8 |
| A-142942 | 978 | 57.0 | 4.6 |
| A-142943 | 990 | 62.8 | 2.8 |
| A-142944 | 1000 | 36.6 | 3.2 |
| A-142945 | 1013 | 52.8 | 3.5 |
| A-142946 | 1022 | 88.5 | 7.3 |
| A-142947 | 1035 | 57.9 | 4.0 |
| A-142948 | 1044 | 31.4 | 4.0 |
| A-142949 | 1057 | 24.5 | 4.2 |
| A-142950 | 1067 | 65.4 | 5.7 |
| A-142951 | 1078 | 76.4 | 10.4 |
| A-142952 | 1090 | 104.6 | 7.6 |
| A-142953 | 1100 | 33.3 | 3.7 |
| A-142954 | 1111 | 35.8 | 2.3 |
| A-142955 | 1123 | 45.6 | 2.9 |
| A-142956 | 1133 | 31.7 | 6.2 |
| A-142957 | 1145 | 112.1 | 5.5 |
| A-142958 | 1155 | 110.1 | 16.1 |
| A-142959 | 1167 | 61.8 | 6.0 |
| A-142960 | 1177 | 38.5 | 2.3 |
| A-142961 | 1187 | 66.1 | 8.6 |
| A-142962 | 1200 | 50.9 | 2.9 |
| A-142963 | 1211 | 47.9 | 3.1 |
| A-142964 | 1222 | 40.6 | 5.0 |
| A-142965 | 1233 | 76.3 | 8.1 |
| A-142966 | 1242 | 37.2 | 3.1 |
| A-142967 | 1253 | 60.6 | 10.1 |
| A-142968 | 1266 | 74.0 | 3.0 |
| A-142969 | 1277 | 43.7 | 0.8 |
| A-142970 | 1288 | 46.7 | 4.5 |
| A-142971 | 1297 | 50.7 | 2.7 |
| A-142972 | 1309 | 39.6 | 4.5 |
| A-142973 | 1320 | 70.3 | 6.2 |
| A-142974 | 1332 | 102.7 | 9.3 |
| A-142975 | 1342 | 40.7 | 4.9 |
| A-142976 | 1354 | 26.7 | 2.0 |
| A-142977 | 1363 | 66.7 | 10.8 |
| A-142978 | 1374 | 49.4 | 5.5 |
| A-142979 | 1386 | 38.4 | 4.3 |
| A-142980 | 1398 | 104.0 | 7.8 |
| A-142981 | 1409 | 109.1 | 14.2 |
| A-142982 | 1418 | 36.5 | 2.6 |
| A-142983 | 1431 | 46.7 | 4.9 |
| A-142984 | 1441 | 55.6 | 8.1 |
| A-142985 | 1452 | 51.6 | 5.9 |
| A-142986 | 1462 | 46.0 | 8.2 |
| A-142987 | 1474 | 30.1 | 0.6 |
| A-142988 | 1485 | 81.2 | 8.6 |
| A-142989 | 1497 | 43.8 | 3.2 |
| A-142990 | 1507 | 42.4 | 3.0 |
| A-142991 | 1517 | 27.0 | 2.7 |
| A-142992 | 1528 | 35.9 | 2.6 |
| A-142993 | 1540 | 32.7 | 2.6 |
| A-142994 | 1550 | 35.9 | 7.5 |
| A-142995 | 1563 | 35.5 | 1.9 |
| A-142996 | 1572 | 58.7 | 10.0 |
| A-142997 | 1584 | 98.8 | 8.2 |
| A-142998 | 1595 | 83.6 | 8.7 |
| A-142999 | 1607 | 96.0 | 6.4 |
| A-143000 | 1618 | 97.0 | 6.0 |
| A-143001 | 1629 | 98.3 | 1.3 |
| A-143002 | 1639 | 89.7 | 1.6 |
| A-143003 | 1650 | 33.9 | 2.4 |
| A-143004 | 1660 | 37.1 | 3.3 |
| A-143005 | 1673 | 41.9 | 5.2 |
| A-143006 | 1682 | 34.7 | 1.9 |
| A-143007 | 1694 | 28.6 | 2.5 |
| A-143008 | 1704 | 57.0 | 3.5 |
| A-143009 | 1716 | 43.2 | 2.0 |
| A-143010 | 1727 | 24.1 | 3.0 |
| A-143011 | 1737 | 45.9 | 3.7 |
| A-143012 | 1749 | 55.0 | 10.5 |
| A-143013 | 1761 | 101.0 | 4.3 |
| A-143014 | 1772 | 57.7 | 7.0 |
| A-143015 | 1781 | 36.6 | 5.1 |
| A-143016 | 1793 | 35.0 | 3.4 |
| A-143017 | 1803 | 42.1 | 1.8 |
| A-143018 | 1814 | 46.7 | 12.8 |
| A-143019 | 1826 | 26.0 | 4.1 |
| A-143020 | 1836 | 24.3 | 1.0 |
| A-143021 | 1848 | 38.0 | 2.1 |
| A-143022 | 1860 | 30.8 | 4.0 |
| A-143023 | 1871 | 50.2 | 6.0 |
| A-143024 | 1881 | 108.8 | 10.8 |
| A-143025 | 1891 | 100.7 | 10.2 |
| A-143026 | 1902 | 111.2 | 7.2 |
| A-143027 | 1915 | 31.7 | 1.8 |
| A-143028 | 1926 | 43.1 | 4.9 |
| A-143029 | 1935 | 83.0 | 8.6 |
| A-143030 | 1947 | 50.1 | 5.7 |
| A-143031 | 1958 | 40.1 | 6.8 |
| A-143032 | 1968 | 117.0 | 3.2 |
| A-143033 | 1980 | 65.8 | 3.1 |
| A-143034 | 1990 | 32.3 | 3.8 |
| A-143035 | 2001 | 63.2 | 2.9 |
| A-143036 | 2013 | 109.5 | 8.7 |
| A-143037 | 2023 | 69.3 | 4.0 |
| A-143038 | 2036 | 67.2 | 6.8 |
| A-143039 | 2045 | 72.7 | 11.4 |
| A-143040 | 2058 | 81.5 | 4.7 |
| A-143041 | 2067 | 104.0 | 11.7 |
| A-143042 | 2078 | 108.7 | 5.7 |
| A-143043 | 2090 | 73.7 | 5.1 |
| A-143044 | 2100 | 78.0 | 9.9 |
| A-143045 | 2112 | 44.6 | 8.0 |
| A-143046 | 2123 | 64.0 | 8.9 |
| A-143047 | 2133 | 76.5 | 10.7 |
| A-143048 | 2144 | 63.4 | 3.6 |
| A-143049 | 2155 | 65.7 | 6.9 |
| A-143050 | 2167 | 46.0 | 2.7 |
| A-143051 | 2179 | 50.1 | 6.3 |
| A-143052 | 2189 | 64.5 | 3.8 |
| A-143053 | 2201 | 90.9 | 8.1 |
| A-143054 | 2211 | 49.1 | 2.9 |
| A-143055 | 2222 | 52.2 | 2.6 |
| A-143056 | 2232 | 63.1 | 4.8 |
| A-143057 | 2243 | 102.8 | 10.5 |
| A-143058 | 2254 | 130.7 | 11.4 |
| A-143059 | 2265 | 80.0 | 1.3 |
| A-143060 | 2277 | 59.0 | 1.0 |
| A-143061 | 2288 | 48.0 | 5.0 |
| A-143062 | 2298 | 127.9 | 7.1 |
| A-143063 | 2311 | 114.5 | 3.3 |
| A-143064 | 2321 | 127.4 | 17.2 |
| A-143065 | 2332 | 44.2 | 3.5 |
| A-143066 | 2343 | 51.5 | 2.1 |
| A-143067 | 2353 | 51.4 | 7.9 |
| A-143068 | 2364 | 41.7 | 10.8 |
| A-143069 | 2375 | 56.4 | 4.0 |
| A-143070 | 2386 | 105.4 | 7.8 |
| A-143071 | 2398 | 97.8 | 7.1 |
| A-143072 | 2410 | 130.4 | 10.7 |
| A-143073 | 2421 | 83.9 | 7.0 |
| A-143074 | 2432 | 79.4 | 9.3 |
| A-143075 | 2442 | 73.8 | 5.7 |
| A-143076 | 2452 | 92.2 | 11.5 |
| A-143077 | 2463 | 60.9 | 4.2 |
| A-143078 | 2474 | 52.4 | 1.8 |
| A-143079 | 2485 | 113.4 | 8.3 |
| A-143080 | 2496 | 63.3 | 3.5 |
| A-143081 | 2507 | 63.1 | 5.7 |
| A-143082 | 2519 | 91.7 | 7.1 |
| A-143083 | 2530 | 82.3 | 3.8 |
| A-143084 | 2540 | 63.8 | 3.6 |
| A-143085 | 2552 | 42.9 | 1.9 |
| A-143086 | 2564 | 54.9 | 3.3 |
| A-143087 | 2575 | 45.8 | 5.3 |
| A-143088 | 2586 | 115.8 | 11.3 |
| A-143089 | 2595 | 116.1 | 7.5 |
| A-143090 | 2606 | 63.9 | 5.0 |
| A-143091 | 2618 | 55.2 | 5.1 |
| A-143092 | 2629 | 83.8 | 7.1 |
| A-143093 | 2640 | 89.8 | 20.1 |
| A-143094 | 2652 | 20.5 | 1.6 |
| A-143095 | 2663 | 64.9 | 5.5 |
| A-143096 | 2672 | 70.8 | 7.8 |
| A-143097 | 2685 | 72.6 | 3.0 |
| A-143098 | 2694 | 99.4 | 7.1 |
| A-143099 | 2707 | 60.7 | 1.3 |
| A-143100 | 2718 | 50.1 | 5.5 |
| A-143101 | 2727 | 58.4 | 1.0 |
| A-143102 | 2739 | 44.5 | 2.8 |
| A-143103 | 2750 | 35.5 | 3.8 |
| A-143104 | 2761 | 37.4 | 3.4 |
| A-143105 | 2771 | 39.8 | 6.0 |
| A-143106 | 2782 | 37.7 | 9.6 |
| A-143107 | 2795 | 68.6 | 4.9 |
| A-143108 | 2805 | 50.1 | 1.3 |
| A-143109 | 2816 | 55.6 | 5.3 |
| A-143110 | 2826 | 35.1 | 4.2 |
| A-143111 | 2838 | 36.6 | 5.6 |
| A-143112 | 2849 | 36.9 | 2.0 |
| A-143113 | 2859 | 39.6 | 4.0 |
| A-143114 | 2870 | 64.5 | 4.3 |
| A-143115 | 2883 | 55.7 | 5.1 |
| A-143116 | 2894 | 65.3 | 8.1 |
| A-143117 | 2904 | 44.8 | 4.0 |
| A-143118 | 2914 | 47.0 | 4.7 |
| A-143119 | 2926 | 77.4 | 9.4 |
| A-143120 | 2936 | 52.7 | 6.3 |
| A-143121 | 2948 | 59.0 | 9.6 |
| A-143122 | 2960 | 55.8 | 4.3 |
| A-143123 | 2970 | 41.6 | 2.3 |
| A-143124 | 2982 | 83.6 | 11.2 |
| A-143125 | 2991 | 75.7 | 2.8 |
| A-143126 | 3004 | 70.0 | 4.5 |
| A-143127 | 3013 | 49.5 | 4.1 |
| A-143128 | 3025 | 62.5 | 7.4 |
| A-143129 | 3035 | 43.3 | 5.9 |
| A-143130 | 3047 | 51.7 | 6.9 |
| A-143131 | 3059 | 69.7 | 3.4 |
| A-143132 | 3069 | 80.0 | 5.5 |
| A-143133 | 3081 | 64.5 | 5.4 |
| A-143134 | 3092 | 62.6 | 7.4 |
| A-143135 | 3103 | 53.4 | 4.4 |
| A-143136 | 3113 | 47.4 | 9.3 |
| A-143137 | 3124 | 52.4 | 4.2 |
| A-143138 | 3135 | 74.3 | 11.7 |
| A-143139 | 3146 | 78.2 | 8.4 |
| A-143140 | 3158 | 48.0 | 4.6 |
| A-143141 | 3167 | 37.0 | 5.5 |
| A-143142 | 3180 | 42.2 | 3.7 |
| A-143143 | 3190 | 73.9 | 10.7 |
| A-143144 | 3202 | 114.8 | 17.8 |
| A-143145 | 3211 | 83.6 | 4.6 |
| A-143146 | 3224 | 111.3 | 10.2 |
| A-143147 | 3234 | 119.8 | 10.1 |
| A-143148 | 3244 | 129.9 | 7.6 |
| A-143149 | 3255 | 94.8 | 8.1 |
| A-143150 | 3267 | 112.3 | 22.4 |
| A-143151 | 3279 | 149.9 | 30.1 |
| A-143152 | 3288 | 117.1 | 6.1 |
| A-143153 | 3300 | 110.4 | 17.0 |
| A-143154 | 3312 | 127.1 | 13.6 |
| A-143155 | 3322 | 105.5 | 8.3 |

1. A single-stranded antisense polynucleotide agent for inhibiting expression of a Programmed cell death 1 ligand 1 (PD-L1) gene, wherein the agent comprises 4 to 50 contiguous nucleotides, wherein at least one of the contiguous nucleotides is a modified nucleotide, and wherein the nucleotide sequence of the agent is 80% complementary over its entire length to the equivalent region of the nucleotide sequence of any one of SEQ ID NOs:1-5.

2. The agent of claim 1, wherein the agent comprises 4 to 50 contiguous nucleotides, wherein at least one of the contiguous nucleotides is a modified nucleotide, and wherein the nucleotide sequence of the agent is 80% complementary over its entire length to the equivalent region of the nucleotide sequence of any one of residues 10-29; 44-75; 44-141; 78-141; 187-305; 309-349; 351-467; 309-467; 472-503; 505-570; 472-570; 571-590; 505-590; 606-647; 681-755; 769-788; 793-811; 815-834; 859-911; 1000-1019; 1044-1076; 1100-1152; 1177-1196; 1211-1241; 1242-1261; 1211-1261; 1277-1307; 1309-1328; 1277-1328; 1342-1373; 1374-1407; 1418-1450; 1462-1493; 1497-1582; 1650-1713; 1650-1756; 1716-1756; 1781-1879; 1915-1945; 1958-1977; 1990-2009; 2112-2131; 2167-2186; 2211-2230; 2288-2307; 2332-2351; 2364-2383; 2552-2571; 2575-2594; 2552-2594; 2652-2671; 2739-2801; 2826-2878; 2904-2933; 2970-2989; 3013-3032; 3035-3054; 3113-3142; 3158-3199 of SEQ ID NO:1

3.-6. (canceled)

7. The agent of claim 1, wherein substantially all of the nucleotides are modified nucleotides.

8. The agent of claim 1, wherein all of the nucleotides are modified nucleotides.

9. The agent of claim 1, which is 10 to nucleotides in length; 10 to 30 nucleotides in length; 18 to 30 nucleotides in length; 10 to 24 nucleotides in length; 18 to 24 nucleotides in length; 14 to 20 nucleotides in length; 14 nucleotides in length; or 20 nucleotides in length.

10. 16. (canceled)

17. The agent of claim 1, wherein the modified nucleotide comprises a modified sugar moiety selected from the group consisting of: a 2′-O-methoxyethyl modified sugar moiety, a 2′-methoxy modified sugar moiety, a 2′-O-alkyl modified sugar moiety, a bicyclic sugar moiety, a 5-methylcytosine, and a modified internucleoside linkage.

18. The agent of claim 17, wherein the bicyclic sugar moiety has a (— CRH—)n group forming a bridge between the 2′ oxygen and the 4′ carbon atoms of the sugar ring, wherein n is 1 or 2 and wherein R is H, CH₃ or CH₃OCH₃.

19.-21. (canceled)

22. The agent of claim 17, wherein the modified internucleoside linkage is a phosphorothioate internucleoside linkage.

23. The agent of claim 1, wherein the agent is a gapmer comprising a plurality of 2′-deoxynucleotides flanked on each of a 5′ and a 3′ side by a wing segment comprising at least one nucleotide having a modified sugar moiety.

24. (canceled)

25. The agent of claim 23, wherein the modified sugar moiety is selected from the group consisting of a 2′-O-methoxyethyl modified sugar moiety, a 2′-methoxy modified sugar moiety, a 2′-O-alkyl modified sugar moiety, and a bicyclic sugar moiety.

26. The agent of claim 23, wherein the 5′-wing segment is 1 to 6 nucleotides in length; 2 nucleotides in length; 3 nucleotides in length; 4 nucleotides in length; or 5 nucleotides in length.

27. The agent of claim 23, wherein the 3′-wing segment is 1 to 6 nucleotides in length; 2 nucleotides in length; 3 nucleotides in length; 4 nucleotides in length; or 5 nucleotides in length.

28. The agent of claim 23, wherein the gap segment is 5 to 14 nucleotides in length; or 10 nucleotides in length.

29.-43. (canceled)

44. The agent of claim 1, wherein the agent further comprises a ligand.

45. The agent of claim 44, wherein the antisense polynucleotide agent is conjugated to the ligand at the 3′-terminus.

46. The agent of claim 44, wherein the ligand is an N-acetylgalactosamine (GalNAc) derivative.

47. The agent of claim 46, wherein the ligand is

[chemical structure]

48. A pharmaceutical composition for inhibiting expression of a Programmed cell death 1 ligand 1 gene comprising the agent of claim 1.

49.-53. (canceled)

54. A pharmaceutical composition comprising the agent of claim 1, and a lipid formulation.

55. (canceled)

56. (canceled)

57. A method of inhibiting expression of a Programmed cell death 1 ligand 1 (PD-L1) gene in a cell, the method comprising:
(a) contacting the cell with the agent of claim 1 ; and
(b) maintaining the cell produced in step (a) for a time sufficient to obtain antisense inhibition of a PD-L1gene, thereby inhibiting expression of the PD-L1gene in the cell.

58.-60. (canceled)

61. A method of treating a subject having a disease or disorder that would benefit from reduction in expression of a Programmed cell death 1 ligand 1 (PD-L1) gene, the method comprising administering to the subject a therapeutically effective amount of the agent of claim 1, thereby treating the subject.

62.-75. (canceled)

The application's sequence listing, which the Patent Office published only in electronic form, follows.

SEQUENCE LISTING (619 sequences)

SEQ ID NO: 1 - DNA, 3349 bp, Homo sapiens
  source 1..3349: mol_type = other DNA
ggcgcaacgctgagcagctggcgcgtcccgcgcggccccagttctgcgcagcttcccgaggctccgcaccagccgcgcttctgtccgcctgcagggcattccagaaagatgaggatatttgctgtctttatattcatgacctactggcatttgctgaacgccccatacaacaaaatcaaccaaagaattttggttgtggatccagtcacctctgaacatgaactgacatgtcaggctgagggctaccccaaggccgaagtcatctggacaagcagtgaccatcaagtcctgagtggtaagaccaccaccaccaattccaagagagaggagaagcttttcaatgtgaccagcacactgagaatcaacacaacaactaatgagattttctactgcacttttaggagattagatcctgaggaaaaccatacagctgaattggtcatcccagaactacctctggcacatcctccaaatgaaaggactcacttggtaattctgggagccatcttattatgccttggtgtagcactgacattcatcttccgtttaagaaaagggagaatgatggatgtgaaaaaatgtggcatccaagatacaaactcaaagaagcaaagtgatacacatttggaggagacgtaatccagcattggaacttctgatcttcaagcagggattctcaacctgtggtttaggggttcatcggggctgagcgtgacaagaggaaggaatgggcccgtgggatgcaggcaatgtgggacttaaaaggcccaagcactgaaaatggaacctggcgaaagcagaggaggagaatgaagaaagatggagtcaaacagggagcctggagggagaccttgatactttcaaatgcctgaggggctcatcgacgcctgtgacagggagaaaggatacttctgaacaaggagcctccaagcaaatcatccattgctcatcctaggaagacgggttgagaatccctaatttgagggtcagttcctgcagaagtgccctttgcctccactcaatgcctcaatttgttttctgcatgactgagagtctcagtgttggaacgggacagtatttatgtatgagtttttcctatttattttgagtctgtgaggtcttcttgtcatgtgagtgtggttgtgaatgatttcttttgaagatatattgtagtagatgttacaattttgtcgccaaactaaacttgctgcttaatgatttgctcacatctagtaaaacatggagtatttgtaaggtgcttggtctcctctataactacaagtatacattggaagcataaagatcaaaccgttggttgcataggatgtcacctttatttaacccattaatactctggttgacctaatcttattctcagacctcaagtgtctgtgcagtatctgttccatttaaatatcagctttacaattatgtggtagcctacacacataatctcatttcatcgctgtaaccaccctgttgtgataaccactattattttacccatcgtacagctgaggaagcaaacagattaagtaacttgcccaaaccagtaaatagcagacctcagactgccacccactgtccttttataatacaatttacagctatattttactttaagcaattcttttattcaaaaaccatttattaagtgcccttgcaatatcaatcgctgtgccaggcattgaatctacagatgtgagcaagacaaagtacctgtcctcaaggagctcatagtataatgaggagattaacaagaaaatgtattattacaatttagtccagtgtcatagcataaggatgatgcgaggggaaaacccgagcagtgttgccaagaggaggaaataggccaatgtggtctgggacggttggatatacttaaacatcttaataatcagagtaattttcatttacaaagagaggtcggtacttaaaataaccctgaaaaataacactggaattccttttctagcattatatttattcctgatttgcctttgccatataatctaatgcttgtttatatagtgtctggtattgtttaacagttctgtcttttctatttaaatgccactaaattttaaattcatacctttccatgattcaaaattcaaaagatcccatgggagatggttggaaaatctccacttcatcctccaagccattcaagtttcctttccagaagcaactgctactgcctttcattcatatgttcttctaaagatagtctacatttggaaatgtatgttaaaagcacgtatttttaaaatttttttcctaaatagtaacacattgtatgtctgctgtgtactttgctatttttatttattttagtgtttcttatatagcagatggaatgaatttgaagttcccagggctgaggatccatgccttctttgtttctaagttatctttcccatagcttttcattatctttcatatgatccagtatatgttaaatatgtcctacatatacatttagacaaccaccatttgttaagtatttgctctaggacagagtttggatttgtttatgtttgctcaaaaggagacccatgggctctccagggtgcactgagtcaatctagtcctaaaaagcaatcttattattaactctgtatgacagaatcatgtctggaacttttgttttctgctttctgtcaagtataaacttcactttgatgctgtacttgcaaaatcacattttctttctggaaattccggcagtgtaccttgactgctagctaccctgtgccagaaaagcctcattcgttgtgcttgaacccttgaatgccaccagctgtcatcactacacagccctcctaagaggcttcctggaggtttcgagattcagatgccctgggagatcccagagtttcctttccctcttggccatattctggtgtcaatgacaaggagtaccttggctttgccacatgtcaaggctgaagaaacagtgtctccaacagagctccttgtgttatctgtttgtacatgtgcatttgtacagtaattggtgtgacagtgttctttgtgtgaattacaggcaagaattgtggctgagcaaggcacatagtctactcagtctattcctaagtcctaactcctccttgtggtgttggatttgtaaggcactttatcccttttgtctcatgtttcatcgtaaatggcataggcagagatgatacctaattctgcatttgattgtcactttttgtacctgcattaatttaataaaatattcttatttattttgttacttggtacaccagcatgtccattttcttgtttattttgtgtttaataaaatgttcagtttaacatcccagtggagaaagttaaaaaa

SEQ ID NO: 2 - DNA, 3566 bp, Mus musculus
  source 1..3566: mol_type = other DNA
tggtccccaagcctcatgccaggctgcacttgcacgtcgcgggccagtctcctcgcctgcagcgtttactatcacggctccaaaggacttgtacgtggtggagtatggcagcaacgtcacgatggagtgcagattccctgtagaacgggagctggacctgcttgcgttagtggtgtactgggaaaaggaagatgagcaagtgattcagtttgtggcaggagaggaggaccttaagcctcagcacagcaacttcagggggagagcctcgctgccaaaggaccagcttttgaagggaaatgctgcccttcagatcacagacgtcaagctgcaggacgcaggcgtttactgctgcataatcagctacggtggtgcggactacaagcgaatcacgctgaaagtcaatgccccataccgcaaaatcaaccagagaatttccgtggatccagccacttctgagcatgaactaatatgtcaggccgagggttatccagaagctgaggtaatctggacaaacagtgaccaccaacccgtgagtgggaagagaagtgtcaccacttcccggacagaggggatgcttctcaatgtgaccagcagtctgagggtcaacgccacagcgaatgatgttttctactgtacgttttggagatcacagccagggcaaaaccacacagcggagctgatcatcccagaactgcctgcaacacatcctccacagaacaggactcactgggtgcttctgggatccatcctgttgttcctcattgtagtgtccacggtcctcctcttcttgagaaaacaagtgagaatgctagatgtggagaaatgtggcgttgaagatacaagctcaaaaaaccgaaatgatacacaattcgaggagacgtaagcagtgttgaaccctctgatcgtcgattggcagcttgtggtctgtgaaagaaagggcccatgggacatgagtccaaagactcaagatggaacctgagggagagaaccaagaaagtgttgggagaggagcctggaacaacggacattttttccagggagacactgctaagcaagttgcccatcagtcgtcttgggaaatggattgagggttcctggcttagcagctggtccttgcacagtgaccttttcctctgctcagtgccgggatgagagatggagtcatgagtgttgaagaataagtgccttctatttattttgagtctgtgtgttctcactttgggcatgtaattatgactggtgaattctgacgacatgatagatcttaagatgtagtcaccaaactcaactgctgcttagcatcctccgtaactactgatacaagcagggaacacagaggtcacctgcttggtttgacaggctcttgctgtctgactcaaataatctttatttttcagtcctcaaggctcttcgatagcagttgttctgtatcagccttataggtgtcaggtatagcactcaacatctcatctcattacaatagcaaccctcatcaccatagcaacagctaacctctgttatcctcacttcatagccaggaagctgagcgactaagtcacttgcccacagagtatcagctctcagatttctgttcttcagccactgtcctttcaggatagaatttgtcgttaagaaattaatttaaaaactgattattgagtagcattgtatatcaatcacaacatgccttgtgcactgtgctggcctctgagcataaagatgtacgccggagtaccggtcggacatgtttatgtgtgttaaatactcagagaaatgttcattaacaaggagcttgcattttagagacactggaaagtaactccagttcattgtctagcattacatttacctcatttgctatccttgccatacagtctcttgttctccatgaagtgtcatgaatcttgttgaatagttcttttattttttaaatgtttctatttaaatgatattgacatctgaggcgatagctcagttggtaaaaccctttcctcacaagtgtgaaaccctgagtcttatccctagaacccacataaaaaacagttgcgtatgtttgtgcatgcttttgatcccagcactagggaggcagaggcaggcagatcctgagctctcattgaccacccagcctagcctacatggttagctccaggcctacaggagctggcagagcctgaaaaacgatgcctagacacacacacacacacacacacacacacacacacacacacacaccatgtactcatagacctaagtgcaccctcctacacatgcacacacatacaattcaaacacaaatcaacagggaattgtctcagaatggtccccaagacaaagaagaagaaaaacaccaaaccagctctattccctcagcctatcctctctactccttcctagaagcaactactattgtttttgtatataaatttacccaacgacagttaatatgtagaatatatattaaagtgtctgtcaatatatattatctctttctttctttcttcctttctttctttctttctttctttctttctttctttctttctttctttcttccttccttccttccttccttccttccttccttcctttctttctttctttctttttttctgtctatctgtacctaaatggttgctcactatgcattttctgtgctcttcgccctttttatttaatgtatggatatttatgctgcttccagaatggatctaaagctctttgtttctaggttttctcccccatccttctaggcatctctcacactgtctaggccagacaccatgtctgctgcctgaatctgtagacaccatttataaagcacgtactcaccgagtttgtatttggcttgttctgtgtctgattaaagggagaccatgagtccccagggtacactgagttaccccagtaccaagggggagccttgtttgtgtctccatggcagaagcaggcctggagccattttggtttcttccttgacttctctcaaacacagacgcctcacttgctcattacaggttctcctttgggaatgtcagcattgctccttgactgctggctgccctggaaggagcccattagctctgtgtgagcccttgacagctactgcctctccttaccacaggggcctctaagatactgttacctagaggtcttgaggatctgtgttctctggggggaggaaaggaggaggaacccagaactttcttacagttttccttgttctgtcacatgtcaagactgaaggaacaggctgggctacgtagtgagatcctgtctcaaaggaaagacgagcatagccgaacccccggtggaaccccctctgttacctgttcacacaagcttattgatgagtctcatgttaatgtcttgtttgtatgaagtttaagaaaatatcgggttgggcaacacattctatttattcattttatttgaaatcttaatgccatctcatggtgttggattggtgtggcactttattcttttgtgttgtgtataaccataaattttattttgcatcagattgtcaatgtattgcattaatttaataaatatttttatttattaaa

SEQ ID NO: 3 - DNA, 3706 bp, Rattus norvegicus
  source 1..3706: mol_type = other DNA
tctttgctacggataagaccaggaaatcgccctccccagcctccagccaggctgcagctacgcgacttgccagtctcctcgcctacaggtaagtctcaaaccatgaggatatttgctgtccttatagtcacagcctgcagtcacgtgctagcggcatttaccatcacagctccaaaggacctgtacgtggtggagtatggcagcaatgtcacgatggaatgcagattcccagtagaacagaaattggacctgcttgccttagtggtgtactgggaaaaggaagacaaggaagttattcagtttgtggagggagaggaggacctgaagcctcaacacagcagcttcagggggagagccttcttgccaaaggaccagcttttgaaggggaacgcggtgcttcagatcacagatgtcaagctgcaggacgcaggtgtctactgctgcatgatcagctatggtggagcggactacaagcgaatcacattgaaagtcaacgctccataccgcaaaatcaaccaaagaatttccatggatccagccacttctgagcatgaactaatgtgccaggctgagggttacccagaagccgaagtgatctggacaaacagtgaccaccagtccctgagtggggaaacaactgtcaccacttcccagactgaggagaagcttctcaacgtgaccagcgttctgagggtcaacgcaacagctaatgatgttttccactgtacgttctggagagtacactcaggggagaaccacacggctgaactgatcatcccagaactgcctgtaccacgtctcccacataacaggacacactgggtactcctgggatccgtccttttgttcctcatcgtggggttcaccgtcttcttctgcttgagaaaacaagtgagaatgctagatgtggaaaaatgcggcttcgaagatagaaattcaaagaaccgaaatgatacacagttcgaggagacgtaagcagtgttgaaccctctgagcctcgaggcgggattggcagcttgtggtctgtgaaagaaagggcccgtgggacatgggtccagggactcaaaaatggaaccggagaggagaagagaacaaagaaagtgttggaagaggagcctgggacgaaagacatttctacaggagacactgctaagcaagttacccatcagtcatctcgggcaataagttgagggttcctcattttaacagctggtcctcgcacaagtgacctttctctctacccagtgcctggatgagaggcagagtcacaagtgttgaagtgtgagtgccttctatttacttccagtccgtgtgttcttgctgtgggcatgtggttatgactagtgacataataggcgttaaaatgcagtcaccaaactcaactgctgcttagcatcctctgtaactactggcacaagcaggaaacgtggaggtcacatggttcgtttgacgggctcttgctgtccgacttgagtaatcttcattctcaggcctcaaggttctgcagtagtagttgttctctttaaatatctgctttacaagtgttgggtactatactcaaacatcttatttcatcaccatggcaaccctcatactaacctctgtcatactcccttcatagccaagacgctgagtgtctgagtaacttgaccacaaaatgacagctatcagatttctatttttcagacactgtcctttcaggatagaatttgtagctaagaatttaataataaaaaaaaaaccccgcttattaggcacttccacaccacaccatgccttgtgcactgctctggcctctgacagagaaggaagccagagtgccggtcggatttgcttatgtgtgttcaatactcaaatcaatgctcattaacatggagtctgcattttaaagacactctccagttctttgtctagcattatatttacctctaatctgttatccctgccaaacaatctcatgttctccatgaagtgtctagtcttgttgagtagttcttttttttttttttctatttaaatgatattgacatctgaggagacagctcagttggtagaattctttccttacaagtgggaaaccctgttttatccccagaacccacataaaaaacagttgcgtatatctgtgcatgcttaatccaagcactagggaggcagagacaggcagatctctagctctcaccgatcagccagctccaggtctacaagagctgacagtgcctgagaaacatgtctacacacacacacatacacactctcacatacatggaccatgtactcatacacctaagtggactctcttagtgaacacacatacaatggtccccaagacaaaacaaaacaaaaaaaaaataaaccaaactagctctattccatcagcctagccatgctactcccttcccagaagcaactgctattgtttttgcacatatattttcttaaagacagttaatatgtataaatctttgttaaagtatgtctgtctgtctgcctgcctgcctacctatctacctatctatctatccatccatccatccatccatccacccatctgtccatccgtctgtctgtccatctgtctgtctatctacctatctacctacctacatacctatcatctgtctgtctgtctttcctaaatggtataggaaaactgtacgttttctatgcactttgcccttttcatttagtgtattgatacttatgctgcttccagactgatctaaagatccataaagagaactgcctcatttctaggttttctttcccatccctctaggcacctctcacactgtctaggccagacacttgctgcctgtatctgtagacatcatttataaagtgtgtactcaccgagtttgtgtctactcaaagggaggccatgggtccccagggtcactgagtcaacccagtaccaaggtggagccttgtatctccatggcagaagcaaatctggggccatttctgtttcttccttgacttcttttctaaaacacagatgctctaattacttattacaggttgtccctggtaatgtcagcattgctcctagacttctgggtgccctggaaaagcccgttagctctgtgtgaacccttaaggcagctgtctctccttacctcatagacactgtttcctggagggtttgagatactgtttccaaaaggtgttcacttgggcgaggaggggagggggagcccagaactttgttactattttctttgttttgtcacatgtcaaggctgaagaaagagcctgggtatgttggcgcatgtctccagttgcaggcagaggcaggtggatctctgtgagtttgtggccagcctggtctccatagtgaattctaagccagccagggctcggttacatagtgagatcccgtctcaaaggaaagactggcctatcagaacccccagtgaaaccccttctgttacttgttcacacatgtttgttgatgattctcgtgttaatgtcttgtttgtatgacgttcaagaaaagatctggttgggcaacacattgtatttattcatcttattcaaaatcttaatgccatctcatggcattggattggtatggcactttattcttttgtgttctgtataaccacaaatggaaattttattttgtgtctgattgtcattgtattgcattaatttaataagatattatttattaaaaacatttgatttttttcttttttaaaaa

SEQ ID NO: 4 - DNA, 3909 bp, Macaca fascicularis
  source 1..3909: mol_type = other DNA
aaatcaaggtgcgttcagatgttggcttgttgtaaatttctgtttatattaataacataccaaatgtggatttgttttaatcttcggaactctttccggtgaaaacctcatttacaagaaaactggactgacaggtttcactttctgtttcatttctatacatagctttattcctaggacaccaacaccactcgctacccaaactgaaagcttccccgattccgccgaaggtcaggaaagtccaatgccgggcaaactggatttgctgccttgcgcagaggtgggcgggaccccgcctccgggccgggcgccaagttgagcagctggcacgcctcgcgaagccccagtcctgaagccccagtcctgcgctgcttcccgaggctccgcaccagccgcgcttctctctgcctgcagcacattccagaaagatgaggatatttgctgtctttatattcacgatctactggcatttgctgaatgcatttactgtcacggttcccaaggacctatatgtggtagagtatggcagcaatatgacaattgaatgcaaattcccagtagaaaaacaattagacctgacttcactaattgtctattgggaaatggaggataagaacattattcaatttgtgcatggagaggaagacctgaaggttcagcatagtaactacagacagagggcccagctgttgaaggaccagctctccctgggaaatgctgcacttcggatcacagatgtgaaattgcaggatgcaggggtttaccgctgcatgatcagctatggtggtgccgactacaagcggattaccgtgaaagtcaatgctccatacaacaaaatcaaccaaagaattttggttgtcgatccagtcacctctgaacatgaactaacatgtcaggctgagggctaccccaaggccgaagtcatttggacaagcagtgaccatcaagtcctgagtggtaagaccaccaccaccaattccaagagagaggagaagcttttaaatgtgaccagcacactgagaatcaacacaacagctaatgagattttctactgcatttttaggagattagatcctgaggaaaaccatacagctgaattggtcatcccagaactacctctggcgcttcctccaaatgaaaggactcacttggtaattctgggagccatctttttactccttggtgtagcactgacattcatcttctatttaagaaaagggagaatgatggatatgaaaaaatgtggcattcgagttacaaactcaaagaagcaacgtgatacacaattggaggagacgtaatccagcattggaacttctgatcttcaagcagggattctcagcctgtggtttgggggttcgtcagggctgagcatgaccagaggaatgaatgggcccgtgggatgcatgcagtatgggacttaaaaggcccaagcactgaaaatggaacctggcgaaagcagaggaggagaatgaagaaaaatggagttgaacagggagcgtggagggagaccttgatactttcaaatgcctgaggggctcatcggtgcatgtgacagggagaaaggatacttctgaacaaggagcctccaagcaaatcatccactgctcatcttaggaaaacgggttgagaatccctaatttgagggtcagttcctgcagaagtgccctttgcctccactcaatgcctcaatttgttttctgcgtgactgagggtcccagtgttggaacagtatttatgtatgagattttcctatttattttgagtctgtgaggtcttcttgtcatgggagtgtggttgtgaatgatttcttttgaagatatattgtagtagatgttacaattttgtcgccaaactaaacttgatgcttaatgacttgctcacatctagtaaaacatggagtatttgtaaggtgcttggtctcctctataactacaagtacacattggaagcataaagatcaaaccgttgatttgtataggatgtcacctttatttaacccattaatactctgattgacttaatcttattctcagacctcaagtgtctgtgcagtatctgttccatttaaatatcagctttataattatgtggtaccatacacacataatctcctttcatcgctgtaaccaccctgttgtgatgaccactattattttacccattgtacagctgaggaagcaaacagattaagtaacttgccaaaaccagtaaatagcagagctcagactgccacccactgtccttttataatacaatttacagctatattttactttaagcaattcatttattcaaaacccatttattaagtgcccttgcaatatcaatcactgtaccaggcattgaatctacagatgtgagcaagagaaagtacctgtcctcaaggagcttggagtataataaggagattaataagaaaatatattattacaatctagtccagtgtcatagcataaggatgatgtgaggagaaaagctgagcagtgttgccaagaggaggaaataggccaatgtggtctgggacagttgaatgtatttaaacatcttaataatcaaagtaattttcatttacaaagagaagtcagtacttaaaataaccctgaaaaataacactggaattccttttctagcattatatttatccctgatttgcctttgccatacaatctaatgcttgtttatatagtgtctgatattgtttaacagttctgtcttttctattcaaatgctattaaattttaaattcatacctttccatgattcaaaattcaaaagatcccatgggagatggtttgaaaatctccacttcatcctccaagccattcaagtttcctttccagaagcaactgctactgccttttattcatatgttcttctaaagatagtctacatttggaaatgtatgttaaaagcatatatttttaaatttttttccctaaatagtaacacattatatgtctgctgtgcactttgctatttttatttattgtagtgtttcttatgtagcagatggaatgaatttgaagctcccaagggtcaggacacatgccttctttgtttctaagttatctttcccatagcttttcataatctttcatatgatttagtacatgttaaatatgtgctacatatacatttagacaaccagcatttgttaagtatttgctctaggactgagtttggatttatgtttgctcaaaaggagacccatgggctctccagggtgcactgagtcaatctagtcctaaaaagcaatcttattattaactctgtatgacagaatcatatctggaacttttgttttctgctttctgtcaagtataaacttcactttgatgctgtacttgcaaaatcacattttctttctggaaattccagtagtgtaccttgactgctagttaccctgtgccagaaaagcctcattcgttgtgcttgaaccctttaatgccaccagctgtcatcactacacaggcctcctaagaggcttcctggaggttttgagattcagatgccctgagagatcccagagtttcctttccctcttggccacattctggtgtcagtgacaaggaataccttcgctttgccacccgtcaaggttgaagaaacagcgtctccaacagagctccttgtgttatctgtttgtacatgtgcatttgtacagtaatttgtgtgacagtgttctttgtgtgaattacaggcaagaactgtggctgagcaaggcacatagtctactcagtctattcctaactcctccttttggtgttggatttgtaaggcactttatcccttttgtctcatgtttcatcgtaaatggcataggcagagatgatatctaattctgcatttgattgtcactttttgtacctgcattaatttaataaaatatccttatttattttgtta

SEQ ID NO: 5 - DNA, 3691 bp, Homo sapiens
  source 1..3691: mol_type = other DNA
ggcgcaacgctgagcagctggcgcgtcccgcgcggccccagttctgcgcagcttcccgaggctccgcaccagccgcgcttctgtccgcctgcagggcattccagaaagatgaggatatttgctgtctttatattcatgacctactggcatttgctgaacgcatttactgtcacggttcccaaggacctatatgtggtagagtatggtagcaatatgacaattgaatgcaaattcccagtagaaaaacaattagacctggctgcactaattgtctattgggaaatggaggataagaacattattcaatttgtgcatggagaggaagacctgaaggttcagcatagtagctacagacagagggcccggctgttgaaggaccagctctccctgggaaatgctgcacttcagatcacagatgtgaaattgcaggatgcaggggtgtaccgctgcatgatcagctatggtggtgccgactacaagcgaattactgtgaaagtcaatgccccatacaacaaaatcaaccaaagaattttggttgtggatccagtcacctctgaacatgaactgacatgtcaggctgagggctaccccaaggccgaagtcatctggacaagcagtgaccatcaagtcctgagtggtaagaccaccaccaccaattccaagagagaggagaagcttttcaatgtgaccagcacactgagaatcaacacaacaactaatgagattttctactgcacttttaggagattagatcctgaggaaaaccatacagctgaattggtcatcccagaactacctctggcacatcctccaaatgaaaggactcacttggtaattctgggagccatcttattatgccttggtgtagcactgacattcatcttccgtttaagaaaagggagaatgatggatgtgaaaaaatgtggcatccaagatacaaactcaaagaagcaaagtgatacacatttggaggagacgtaatccagcattggaacttctgatcttcaagcagggattctcaacctgtggtttaggggttcatcggggctgagcgtgacaagaggaaggaatgggcccgtgggatgcaggcaatgtgggacttaaaaggcccaagcactgaaaatggaacctggcgaaagcagaggaggagaatgaagaaagatggagtcaaacagggagcctggagggagaccttgatactttcaaatgcctgaggggctcatcgacgcctgtgacagggagaaaggatacttctgaacaaggagcctccaagcaaatcatccattgctcatcctaggaagacgggttgagaatccctaatttgagggtcagttcctgcagaagtgccctttgcctccactcaatgcctcaatttgttttctgcatgactgagagtctcagtgttggaacgggacagtatttatgtatgagtttttcctatttattttgagtctgtgaggtcttcttgtcatgtgagtgtggttgtgaatgatttcttttgaagatatattgtagtagatgttacaattttgtcgccaaactaaacttgctgcttaatgatttgctcacatctagtaaaacatggagtatttgtaaggtgcttggtctcctctataactacaagtatacattggaagcataaagatcaaaccgttggttgcataggatgtcacctttatttaacccattaatactctggttgacctaatcttattctcagacctcaagtgtctgtgcagtatctgttccatttaaatatcagctttacaattatgtggtagcctacacacataatctcatttcatcgctgtaaccaccctgttgtgataaccactattattttacccatcgtacagctgaggaagcaaacagattaagtaacttgcccaaaccagtaaatagcagacctcagactgccacccactgtccttttataatacaatttacagctatattttactttaagcaattcttttattcaaaaaccatttattaagtgcccttgcaatatcaatcgctgtgccaggcattgaatctacagatgtgagcaagacaaagtacctgtcctcaaggagctcatagtataatgaggagattaacaagaaaatgtattattacaatttagtccagtgtcatagcataaggatgatgcgaggggaaaacccgagcagtgttgccaagaggaggaaataggccaatgtggtctgggacggttggatatacttaaacatcttaataatcagagtaattttcatttacaaagagaggtcggtacttaaaataaccctgaaaaataacactggaattccttttctagcattatatttattcctgatttgcctttgccatataatctaatgcttgtttatatagtgtctggtattgtttaacagttctgtcttttctatttaaatgccactaaattttaaattcatacctttccatgattcaaaattcaaaagatcccatgggagatggttggaaaatctccacttcatcctccaagccattcaagtttcctttccagaagcaactgctactgcctttcattcatatgttcttctaaagatagtctacatttggaaatgtatgttaaaagcacgtatttttaaaatttttttcctaaatagtaacacattgtatgtctgctgtgtactttgctatttttatttattttagtgtttcttatatagcagatggaatgaatttgaagttcccagggctgaggatccatgccttctttgtttctaagttatctttcccatagcttttcattatctttcatatgatccagtatatgttaaatatgtcctacatatacatttagacaaccaccatttgttaagtatttgctctaggacagagtttggatttgtttatgtttgctcaaaaggagacccatgggctctccagggtgcactgagtcaatctagtcctaaaaagcaatcttattattaactctgtatgacagaatcatgtctggaacttttgttttctgctttctgtcaagtataaacttcactttgatgctgtacttgcaaaatcacattttctttctggaaattccggcagtgtaccttgactgctagctaccctgtgccagaaaagcctcattcgttgtgcttgaacccttgaatgccaccagctgtcatcactacacagccctcctaagaggcttcctggaggtttcgagattcagatgccctgggagatcccagagtttcctttccctcttggccatattctggtgtcaatgacaaggagtaccttggctttgccacatgtcaaggctgaagaaacagtgtctccaacagagctccttgtgttatctgtttgtacatgtgcatttgtacagtaattggtgtgacagtgttctttgtgtgaattacaggcaagaattgtggctgagcaaggcacatagtctactcagtctattcctaagtcctaactcctccttgtggtgttggatttgtaaggcactttatcccttttgtctcatgtttcatcgtaaatggcataggcagagatgatacctaattctgcatttgattgtcactttttgtacctgcattaatttaataaaatattcttatttattttgttacttggtacaccagcatgtccattttcttgtttattttgtgtttaataaaatgttcagtttaacatcccagtggagaaagttaaaaaa

SEQ ID NO: 6-8 - skipped (3 entries)

SEQ ID NO: 9 - protein, 16 aa, unidentified
  REGION 1..16: note = source = /note="Description of Unknown: RFGF peptide"
AAVALLPAVLLALLAP

SEQ ID NO: 10 - protein, 11 aa, unidentified
  REGION 1..11: note = source = /note="Description of Unknown: RFGF analogue peptide"
AALLPVLLAAP

SEQ ID NO: 11 - protein, 13 aa, Human immunodeficiency virus
GRKKRRQRRRPPQ

SEQ ID NO: 12 - protein, 16 aa, Drosophila sp.
RQIKIWFQNRRMKWKK

SEQ ID NO: 13 - DNA, 1419 bp, synthetic construct
  misc_feature 1..1419: note = source = /note="Description of Artificial Sequence: Synthetic polynucleotide"
  source 1..1419: mol_type = other DNA
ctcgagctgaaaaataacactggaattccttttctagcattatatttattcctgatttgcctttgccatataatctaatgcttgtttatatagtgtctggtattgtttaacagttctgtcttttctatttaaatgccactaaattttaaattcatacctttccatgattcaaaattcaaaagatcccatgggagatggttggaaaatctccacttcatcctccaagccattcaagtttcctttccagaagcaactgctactgcctttcattcatatgttcttctaaagatagtctacatttggaaatgtatgttaaaagcacgtatttttaaaatttttttcctaaatagtaacacattgtatgtctgctgtgtactttgctatttttatttattttagtgtttcttatatagcagatggaatgaatttgaagttcccagggctgaggatccatgccttctttgtttctaagttatctttcccatagcttttcattatctttcatatgatccagtatatgttaaatatgtcctacatatacatttagacaaccaccatttgttaagtatttgctctaggacagagtttggatttgtttatgtttgctcaaaaggagacccatgggctctccagggtgcactgagtcaatctagtcctaaaaagcaatcttattattaactctgtatgacagaatcatgtctggaacttttgttttctgctttctgtcaagtataaacttcactttgatgctgtacttgcaaaatcacattttctttctggaaattccggcagtgtaccttgactgctagctaccctgtgccagaaaagcctcattcgttgtgcttgaacccttgaatgccaccagctgtcatcactacacagccctcctaagaggcttcctggaggtttcgagattcagatgccctgggagatcccagagtttcctttccctcttggccatattctggtgtcaatgacaaggagtaccttggctttgccacatgtcaaggctgaagaaacagtgtctccaacagagctccttgtgttatctgtttgtacatgtgcatttgtacagtaattggtgtgacagtgttctttgtgtgaattacaggcaagaattgtggctgagcaaggcacatagtctactcagtctattcctaagtcctaactcctccttgtggtgttggatttgtaaggcactttatcccttttgtctcatgtttcatcgtaaatggcataggcagagatgatacctaattctgcatttgattgtcactttttgtacctgcattaatttaataaaatattcttatttattttgttacttggtacaccagcatgtccattttcttgtttattttgtgtttaataaaatgttcagtttaacatcccagtggagaaagttaaaaaagcggccgc

SEQ ID NO: 14 - DNA, 753 bp, synthetic construct
  misc_feature 1..753: note = source = /note="Description of Artificial Sequence: Synthetic polynucleotide"
  source 1..753: mol_type = other DNA
ctcgagggcgcaacgctgagcagctggcgcgtcccgcgcggccccagttctgcgcagcttcccgaggctccgcaccagccgcgcttctgtccgcctgcagggcattccagaaagatgaggatatttgctgtctttatattcatgacctactggcatttgctgaacgccccatacaacaaaatcaaccaaagaattttggttgtggatccagtcacctctgaacatgaactgacatgtcaggctgagggctaccccaaggccgaagtcatctggacaagcagtgaccatcaagtcctgagtggtaagaccaccaccaccaattccaagagagaggagaagcttttcaatgtgaccagcacactgagaatcaacacaacaactaatgagattttctactgcacttttaggagattagatcctgaggaaaaccatacagctgaattggtcatcccagaactacctctggcacatcctccaaatgaaaggactcacttggtaattctgggagccatcttattatgccttggtgtagcactgacattcatcttccgtttaagaaaagggagaatgatggatgtgaaaaaatgtggcatccaagatacaaactcaaagaagcaaagtgatacacatttggaggagacgtaatccagcattggaacttctgatcttcaagcagggattctcaacctgtggtttaggggttcatcggggctgagcgtgacaagaggaaggaatgggcccgtgggcggccgc

SEQ ID NO: 15 - DNA, 1418 bp, synthetic construct
  misc_feature 1..1418: note = source = /note="Description of Artificial Sequence: Synthetic polynucleotide"
  source 1..1418: mol_type = other DNA
ctcgagtccagcattggaacttctgatcttcaagcagggattctcaacctgtggtttaggggttcatcggggctgagcgtgacaagaggaaggaatgggcccgtgggatgcaggcaatgtgggacttaaaaggcccaagcactgaaaatggaacctggcgaaagcagaggaggagaatgaagaaagatggagtcaaacagggagcctggagggagaccttgatactttcaaatgcctgaggggctcatcgacgcctgtgacagggagaaaggatacttctgaacaaggagcctccaagcaaatcatccattgctcatcctaggaagacgggttgagaatccctaatttgagggtcagttcctgcagaagtgccctttgcctccactcaatgcctcaatttgttttctgcatgactgagagtctcagtgttggaacgggacagtatttatgtatgagtttttcctatttattttgagtctgtgaggtcttcttgtcatgtgagtgtggttgtgaatgatttcttttgaagatatattgtagtagatgttacaattttgtcgccaaactaaacttgctgcttaatgatttgctcacatctagtaaaacatggagtatttgtaaggtgcttggtctcctctataactacaagtatacattggaagcataaagatcaaaccgttggttgcataggatgtcacctttatttaacccattaatactctggttgacctaatcttattctcagacctcaagtgtctgtgcagtatctgttccatttaaatatcagctttacaattatgtggtagcctacacacataatctcatttcatcgctgtaaccaccctgttgtgataaccactattattttacccatcgtacagctgaggaagcaaacagattaagtaacttgcccaaaccagtaaatagcagacctcagactgccacccactgtccttttataatacaatttacagctatattttactttaagcaattcttttattcaaaaaccatttattaagtgcccttgcaatatcaatcgctgtgccaggcattgaatctacagatgtggcaagacaaagtacctgtcctcaaggagctcatagtataatgaggagattaacaagaaaatgtattattacaatttagtccagtgtcatagcataaggatgatgcgaggggaaaacccgagcagtgttgccaagaggaggaaataggccaatgtggtctgggacggttggatatacttaaacatcttaataatcagagtaattttcatttacaaagagaggtcggtacttaaaataaccctgaaaaataacactggaattccttttctagcattatatttattcctgatttgcctttgccatataatctaatgcttgtttatatagtgtctggtattgtgcggccgc

SEQ ID NO: 16 - RNA, 20 nt, synthetic construct
  source 1..20: mol_type = other RNA
  modified_base 14: mod_base = OTHER; note = 5'-methyluridine-3'-phosphate
gggacgcgccagctgctcag

SEQ ID NO: 17 - RNA, 20 nt, synthetic construct
  source 1..20: mol_type = other RNA
actggggccgcgcgggacgc

SEQ ID NO: 18 - RNA, 20 nt, synthetic construct
  source 1..20: mol_type = other RNA
  modified_base 14: mod_base = OTHER; note = 5'-methyluridine-3'-phosphate
agctgcgcagaactggggcc

SEQ ID NO: 19 - RNA, 20 nt, synthetic construct
  source 1..20: mol_type = other RNA
  modified_base 14: mod_base = OTHER; note = 5'-methyluridine-3'-phosphate
agcctcgggaagctgcgcag

SEQ ID NO: 20 - RNA, 20 nt, synthetic construct
  source 1..20: mol_type = other RNA
  modified_base 8: mod_base = OTHER; note = 5'-methyluridine-3'-phosphate
cggctggtgcggagcctcgg

SEQ ID NO: 21 - RNA, 20 nt, synthetic construct
  source 1..20: mol_type = other RNA
  modified_base 14: mod_base = OTHER; note = 5'-methyluridine-3'-phosphate
acagaagcgcggctggtgcg

SEQ ID NO: 22 - RNA, 20 nt, synthetic construct
  source 1..20: mol_type = other RNA
gccctgcaggcggacagaag

SEQ ID NO: 23 - RNA, 20 nt, synthetic construct
  source 1..20: mol_type = other RNA
  modified_base 6: mod_base = OTHER; note = 5'-methyluridine-3'-phosphate
  modified_base 11: mod_base = OTHER; note = 5'-methyluridine-3'-phosphate
ctttctggaatgccctgcag

SEQ ID NO: 24 - RNA, 20 nt, synthetic construct
  source 1..20: mol_type = other RNA
  modified_base 7: mod_base = OTHER; note = 5'-methyluridine-3'-phosphate
  modified_base 10: mod_base = OTHER; note = 5'-methyluridine-3'-phosphate
  modified_base 12: mod_base = OTHER; note = 5'-methyluridine-3'-phosphate
  modified_base 13: mod_base = OTHER; note = 5'-methyluridine-3'-phosphate
  modified_base 14: mod_base = OTHER; note = 5'-methyluridine-3'-phosphate
atatcctcatctttctggaa

SEQ ID NO: 25 - RNA, 20 nt, synthetic construct
  source 1..20: mol_type = other RNA
  modified_base 12: mod_base = OTHER; note = 5'-methyluridine-3'-phosphate
  modified_base 14: mod_base = OTHER; note = 5'-methyluridine-3'-phosphate
aagacagcaaatatcctcat

SEQ ID NO: 26 - RNA, 20 nt, synthetic construct
  source 1..20: mol_type = other RNA
  modified_base 6: mod_base = OTHER; note = 5'-methyluridine-3'-phosphate
  modified_base 10: mod_base = OTHER; note = 5'-methyluridine-3'-phosphate
  modified_base 12: mod_base = OTHER; note = 5'-methyluridine-3'-phosphate
ggtcatgaatataaagacag

SEQ ID NO: 27 - RNA, 20 nt, synthetic construct
  source 1..20: mol_type = other RNA
  modified_base 9: mod_base = OTHER; note = 5'-methyluridine-3'-phosphate
  modified_base 13: mod_base = OTHER; note = 5'-methyluridine-3'-phosphate
aatgccagtaggtcatgaat

SEQ ID NO: 28 - RNA, 20 nt, synthetic construct
  source 1..20: mol_type = other RNA
  modified_base 6: mod_base = OTHER; note = 5'-methyluridine-3'-phosphate
  modified_base 7: mod_base = OTHER; note = 5'-methyluridine-3'-phosphate
  modified_base 15: mod_base = OTHER; note = 5'-methyluridine-3'-phosphate
gggcgttcagcaaatgccag

SEQ ID NO: 29 - RNA, 20 nt, synthetic construct
  source 1..20: mol_type = other RNA
  modified_base 7: mod_base = OTHER; note = 5'-methyluridine-3'-phosphate
  modified_base 9: mod_base = OTHER; note = 5'-methyluridine-3'-phosphate
ttgttgtatggggcgttcag

SEQ ID NO: 30 - RNA, 20 nt, synthetic construct
  source 1..20: mol_type = other RNA
  modified_base 6: mod_base = OTHER; note = 5'-methyluridine-3'-phosphate
  modified_base 7: mod_base = OTHER; note = 5'-methyluridine-3'-phosphate
  modified_base 10: mod_base = OTHER; note = 5'-methyluridine-3'-phosphate
  modified_base 11: mod_base = OTHER; note = 5'-methyluridine-3'-phosphate
  modified_base 12: mod_base = OTHER; note = 5'-methyluridine-3'-phosphate
  modified_base 13: mod_base = OTHER; note = 5'-methyluridine-3'-phosphate
  modified_base 15: mod_base = OTHER; note = 5'-methyluridine-3'-phosphate
tttggttgattttgttgtat

SEQ ID NO: 31 - RNA, 20 nt, synthetic construct
  source 1..20: mol_type = other RNA
  modified_base 8: mod_base = OTHER; note = 5'-methyluridine-3'-phosphate
  modified_base 9: mod_base = OTHER; note = 5'-methyluridine-3'-phosphate
  modified_base 11: mod_base = OTHER; note = 5'-methyluridine-3'-phosphate
  modified_base 12: mod_base = OTHER; note = 5'-methyluridine-3'-phosphate
  modified_base 13: mod_base = OTHER; note = 5'-methyluridine-3'-phosphate
accaaaattctttggttgat

SEQ ID NO: 32 - RNA, 20 nt, synthetic construct
  source 1..20: mol_type = other RNA
  modified_base 7: mod_base = OTHER; note = 5'-methyluridine-3'-phosphate
actggatccacaaccaaaat

SEQ ID NO: 33 - RNA, 20 nt, synthetic construct
  source 1..20: mol_type = other RNA
  modified_base 11: mod_base = OTHER; note = 5'-methyluridine-3'-phosphate
  modified_base 15: mod_base = OTHER; note = 5'-methyluridine-3'-phosphate
tgttcagaggtgactggatc

SEQ ID NO: 34 - RNA, 20 nt, synthetic construct
  source 1..20: mol_type = other RNA
  modified_base 8: mod_base = OTHER; note = 5'-methyluridine-3'-phosphate
  modified_base 9: mod_base = OTHER; note = 5'-methyluridine-3'-phosphate
  modified_base 12: mod_base = OTHER; note = 5'-methyluridine-3'-phosphate
  modified_base 14: mod_base = OTHER; note = 5'-methyluridine-3'-phosphate
  modified_base 15: mod_base = OTHER; note = 5'-methyluridine-3'-phosphate
atgtcagttcatgttcagag

SEQ ID NO: 35 - RNA, 20 nt, synthetic construct
  source 1..20: mol_type = other RNA
  modified_base 8: mod_base = OTHER; note = 5'-methyluridine-3'-phosphate
  modified_base 13: mod_base = OTHER; note = 5'-methyluridine-3'-phosphate
  modified_base 15: mod_base = OTHER; note = 5'-methyluridine-3'-phosphate
ctcagcctgacatgtcagtt

SEQ ID NO: 36 - RNA, 20 nt, synthetic construct
  source 1..20: mol_type = other RNA
  modified_base 6: mod_base = OTHER; note = 5'-methyluridine-3'-phosphate
  modified_base 12: mod_base = OTHER; note = 5'-methyluridine-3'-phosphate
tggggtagccctcagcctga

SEQ ID NO: 37 - RNA, 20 nt, synthetic construct
  source 1..20: mol_type = other RNA
  modified_base 6: mod_base = OTHER; note = 5'-methyluridine-3'-phosphate
  modified_base 12: mod_base = OTHER; note = 5'-methyluridine-3'-phosphate
  modified_base 13: mod_base = OTHER; note = 5'-methyluridine-3'-phosphate
tgacttcggccttggggtag

SEQ ID NO: 38 - RNA, 20 nt, synthetic construct
  source 1..20: mol_type = other RNA
  modified_base 10: mod_base = OTHER; note = 5'-methyluridine-3'-phosphate
  modified_base 14: mod_base = OTHER; note = 5'-methyluridine-3'-phosphate
  modified_base 15: mod_base = OTHER; note = 5'-methyluridine-3'-phosphate
ttgtccagatgacttcggcc

SEQ ID NO: 39 - RNA, 20 nt, synthetic construct
  source 1..20: mol_type = other RNA
  modified_base 9: mod_base = OTHER; note = 5'-methyluridine-3'-phosphate
  modified_base 12: mod_base = OTHER; note = 5'-methyluridine-3'-phosphate
  modified_base 13: mod_base = OTHER; note = 5'-methyluridine-3'-phosphate
  modified_base 15: mod_base = OTHER; note = 5'-methyluridine-3'-phosphate
atggtcactgcttgtccaga

SEQ ID NO: 40 - RNA, 20 nt, synthetic construct
  source 1..20: mol_type = other RNA
  modified_base 10: mod_base = OTHER; note = 5'-methyluridine-3'-phosphate
  modified_base 11: mod_base = OTHER; note = 5'-methyluridine-3'-phosphate
  modified_base 14: mod_base = OTHER; note = 5'-methyluridine-3'-phosphate
actcaggacttgatggtcac

SEQ ID NO: 41 - RNA, 20 nt, synthetic construct
  source 1..20: mol_type = other RNA
  modified_base 7: mod_base = OTHER; note = 5'-methyluridine-3'-phosphate
  modified_base 8: mod_base = OTHER; note = 5'-methyluridine-3'-phosphate
  modified_base 14: mod_base = OTHER; note = 5'-methyluridine-3'-phosphate
gtggtcttaccactcaggac

SEQ ID NO: 42 - RNA, 20 nt, synthetic construct
  source 1..20: mol_type = other RNA
  modified_base 6: mod_base = OTHER; note = 5'-methyluridine-3'-phosphate
  modified_base 9: mod_base = OTHER; note = 5'-methyluridine-3'-phosphate
  modified_base 12: mod_base = OTHER; note = 5'-methyluridine-3'-phosphate
  modified_base 15: mod_base = OTHER; note = 5'-methyluridine-3'-phosphate
attggtggtggtggtcttac

SEQ ID NO: 43 - RNA, 20 nt, synthetic construct
  source 1..20: mol_type = other RNA
  modified_base 7: mod_base = OTHER; note = 5'-methyluridine-3'-phosphate
  modified_base 9: mod_base = OTHER; note = 5'-methyluridine-3'-phosphate
  modified_base 10: mod_base = OTHER; note = 5'-methyluridine-3'-phosphate
  modified_base 15: mod_base = OTHER; note = 5'-methyluridine-3'-phosphate
cctctctcttggaattggtg

SEQ ID NO: 44 - RNA, 20 nt, synthetic construct
  source 1..20: mol_type = other RNA
  modified_base 6: mod_base = OTHER; note = 5'-methyluridine-3'-phosphate
  modified_base 7: mod_base = OTHER; note = 5'-methyluridine-3'-phosphate
  modified_base 9: mod_base = OTHER; note = 5'-methyluridine-3'-phosphate
  modified_base 12: mod_base = OTHER; note = 5'-methyluridine-3'-phosphate
  modified_base 14: mod_base = OTHER; note = 5'-methyluridine-3'-phosphate
aaagcttctcctctctcttg

SEQ ID NO: 45 - RNA, 20 nt, synthetic construct
  source 1..20: mol_type = other RNA
  modified_base 9: mod_base = OTHER; note = 5'-methyluridine-3'-phosphate
  modified_base 10: mod_base = OTHER; note = 5'-methyluridine-3'-phosphate
tggtcacattgaaaagcttc

SEQ ID NO: 46 - RNA, 20 nt, synthetic construct
  source 1..20: mol_type = other RNA
  modified_base 7: mod_base = OTHER; note = 5'-methyluridine-3'-phosphate
  modified_base 9: mod_base = OTHER; note = 5'-methyluridine-3'-phosphate
  modified_base 12: mod_base = OTHER; note = 5'-methyluridine-3'-phosphate
  modified_base 15: mod_base = OTHER; note = 5'-methyluridine-3'-phosphate
tctcagtgtgctggtcacat

SEQ ID NO: 47 - RNA, 20 nt, synthetic construct
  source 1..20: mol_type = other RNA
  modified_base 6: mod_base = OTHER; note = 5'-methyluridine-3'-phosphate
  modified_base 7: mod_base = OTHER; note = 5'-methyluridine-3'-phosphate
  modified_base 10: mod_base = OTHER; note = 5'-methyluridine-3'-phosphate
  modified_base 11: mod_base = OTHER; note = 5'-methyluridine-3'-phosphate
  modified_base 13: mod_base = OTHER; note = 5'-methyluridine-3'-phosphate
ttgtgttgattctcagtgtg

SEQ ID NO: 48 - RNA, 20 nt, synthetic construct
  source 1..20: mol_type = other RNA
  modified_base 6: mod_base = OTHER; note = 5'-methyluridine-3'-phosphate
  modified_base 7: mod_base = OTHER; note = 5'-methyluridine-3'-phosphate
  modified_base 10: mod_base = OTHER; note = 5'-methyluridine-3'-phosphate
  modified_base 11: mod_base = OTHER; note = 5'-methyluridine-3'-phosphate
  modified_base 13: mod_base = OTHER; note = 5'-methyluridine-3'-phosphate
  modified_base 14: mod_base = OTHER; note = 5'-methyluridine-3'-phosphate
tctcattagttgttgtgttg

SEQ ID NO: 49 - RNA, 20 nt, synthetic construct
  source 1..20: mol_type = other RNA
  modified_base 6: mod_base = OTHER; note = 5'-methyluridine-3'-phosphate
  modified_base 13: mod_base = OTHER; note = 5'-methyluridine-3'-phosphate
  modified_base 15: mod_base = OTHER; note = 5'-methyluridine-3'-phosphate
tgcagtagaaaatctcatta

SEQ ID NO: 50 - RNA, 20 nt, synthetic construct
  source 1..20: mol_type = other RNA
  modified_base 10: mod_base = OTHER; note = 5'-methyluridine-3'-phosphate
  modified_base 15: mod_base = OTHER; note = 5'-methyluridine-3'-phosphate
tcctaaaagtgcagtagaaa

SEQ ID NO: 51 - RNA, 20 nt, synthetic construct
  source 1..20: mol_type = other RNA
  modified_base 7: mod_base = OTHER; note = 5'-methyluridine-3'-phosphate
  modified_base 10: mod_base = OTHER; note = 5'-methyluridine-3'-phosphate
  modified_base 12: mod_base = OTHER; note = 5'-methyluridine-3'-phosphate
  modified_base 15: mod_base = OTHER; note = 5'-methyluridine-3'-phosphate
aggatctaatctcctaaaag

SEQ ID NO: 52 - RNA, 20 nt, synthetic construct
  source 1..20: mol_type = other RNA
  modified_base 6: mod_base = OTHER; note = 5'-methyluridine-3'-phosphate
  modified_base 7: mod_base = OTHER; note = 5'-methyluridine-3'-phosphate
  modified_base 10: mod_base = OTHER; note = 5'-methyluridine-3'-phosphate
tggttttcctcaggatctaa

SEQ ID NO: 53 - RNA, 20 nt, synthetic construct
  source 1..20: mol_type = other RNA
  modified_base 9: mod_base = OTHER; note = 5'-methyluridine-3'-phosphate
  modified_base 11: mod_base = OTHER; note = 5'-methyluridine-3'-phosphate
  modified_base 13: mod_base = OTHER; note = 5'-methyluridine-3'-phosphate
aattcagctgtatggttttc

SEQ ID NO: 54 - RNA, 20 nt, synthetic construct
  source 1..20: mol_type = other RNA
  modified_base 6: mod_base = OTHER; note = 5'-methyluridine-3'-phosphate
  modified_base 13: mod_base = OTHER; note = 5'-methyluridine-3'-phosphate
  modified_base 14: mod_base = OTHER; note = 5'-methyluridine-3'-phosphate
tgggatgaccaattcagctg

SEQ ID NO: 55 - RNA, 20 nt, synthetic construct
  source 1..20: mol_type = other RNA
  modified_base 6: mod_base = OTHER; note = 5'-methyluridine-3'-phosphate
  modified_base 9: mod_base = OTHER; note = 5'-methyluridine-3'-phosphate
  modified_base 10: mod_base = OTHER; note = 5'-methyluridine-3'-phosphate
  modified_base 12: mod_base = OTHER; note = 5'-methyluridine-3'-phosphate
agaggtagttctgggatgac

SEQ ID NO: 56 - RNA, 20 nt, synthetic construct
  source 1..20: mol_type = other RNA
  modified_base 7: mod_base = OTHER; note = 5'-methyluridine-3'-phosphate
  modified_base 9: mod_base = OTHER; note = 5'-methyluridine-3'-phosphate
ggaggatgtgccagaggtag

SEQ ID NO: 57 - RNA, 20 nt, synthetic construct
  source 1..20: mol_type = other RNA
  modified_base 8: mod_base = OTHER; note = 5'-methyluridine-3'-phosphate
  modified_base 9: mod_base = OTHER; note = 5'-methyluridine-3'-phosphate
  modified_base 10: mod_base = OTHER; note = 5'-methyluridine-3'-phosphate
cctttcatttggaggatgtg

SEQ ID NO: 58 - RNA, 20 nt, synthetic construct
  source 1..20: mol_type = other RNA
  modified_base 7: mod_base = OTHER; note = 5'-methyluridine-3'-phosphate
  modified_base 11: mod_base = OTHER; note = 5'-methyluridine-3'-phosphate
  modified_base 14: mod_base = OTHER; note = 5'-methyluridine-3'-phosphate
  modified_base 15: mod_base = OTHER; note = 5'-methyluridine-3'-phosphate
accaagtgagtcctttcatt

SEQ ID NO: 59 - RNA, 20 nt, synthetic construct
  source 1..20: mol_type = other RNA
  modified_base 11: mod_base = OTHER; note = 5'-methyluridine-3'-phosphate
  modified_base 12: mod_base = OTHER; note = 5'-methyluridine-3'-phosphate
gctcccagaattaccaagtg

SEQ ID NO: 60 - RNA, 20 nt, synthetic construct
  source 1..20: mol_type = other RNA
  modified_base 9: mod_base = OTHER; note = 5'-methyluridine-3'-phosphate
  modified_base 13: mod_base = OTHER; note = 5'-methyluridine-3'-phosphate
taataagatggctcccagaa

SEQ ID NO: 61 - RNA, 20 nt, synthetic construct
  source 1..20: mol_type = other RNA
  modified_base 12: mod_base = OTHER; note = 5'-methyluridine-3'-phosphate
  modified_base 15: mod_base = OTHER; note = 5'-methyluridine-3'-phosphate
acaccaaggcataataagat

SEQ ID NO: 62 - RNA, 20 nt, synthetic construct
  source 1..20: mol_type = other RNA
  modified_base 9: mod_base = OTHER; note = 5'-methyluridine-3'-phosphate
  modified_base 12: mod_base = OTHER; note = 5'-methyluridine-3'-phosphate
aatgtcagtgctacaccaag

SEQ ID NO: 63 - RNA, 20 nt, synthetic construct
  source 1..20: mol_type = other RNA
  modified_base 9: mod_base = OTHER; note = 5'-methyluridine-3'-phosphate
  modified_base 13: mod_base = OTHER; note = 5'-methyluridine-3'-phosphate
  modified_base 15: mod_base = OTHER; note = 5'-methyluridine-3'-phosphate
acggaagatgaatgtcagtg

SEQ ID NO: 64 - RNA, 20 nt, synthetic construct
  source 1..20: mol_type = other RNA
  modified_base 6: mod_base = OTHER; note = 5'-methyluridine-3'-phosphate
  modified_base 7: mod_base = OTHER; note = 5'-methyluridine-3'-phosphate
  modified_base 8: mod_base = OTHER; note = 5'-methyluridine-3'-phosphate
  modified_base 10: mod_base = OTHER; note = 5'-methyluridine-3'-phosphate
  modified_base 11: mod_base = OTHER; note = 5'-methyluridine-3'-phosphate
tcccttttcttaaacggaag

SEQ ID NO: 65 - RNA, 20 nt, synthetic construct
  source 1..20: mol_type = other RNA
  modified_base 6: mod_base = OTHER; note = 5'-methyluridine-3'-phosphate
  modified_base 9: mod_base = OTHER; note = 5'-methyluridine-3'-phosphate
  modified_base 10: mod_base = OTHER; note = 5'-methyluridine-3'-phosphate
  modified_base 12: mod_base = OTHER; note = 5'-methyluridine-3'-phosphate
atccatcattctcccttttc

SEQ ID NO: 66 - RNA, 20 nt, synthetic construct
  source 1..20: mol_type = other RNA
  modified_base 6: mod_base = OTHER; note = 5'-methyluridine-3'-phosphate
  modified_base 7: mod_base = OTHER; note = 5'-methyluridine-3'-phosphate
  modified_base 12: mod_base = OTHER; note = 5'-methyluridine-3'-phosphate
attttttcacatccatcatt

SEQ ID NO: 67 - RNA, 20 nt, synthetic construct
  source 1..20: mol_type = other RNA
  modified_base 12: mod_base = OTHER; note = 5'-methyluridine-3'-phosphate
  modified_base 13: mod_base = OTHER; note = 5'-methyluridine-3'-phosphate
  modified_base 14: mod_base = OTHER; note = 5'-methyluridine-3'-phosphate
  modified_base 15: mod_base = OTHER; note = 5'-methyluridine-3'-phosphate
tggatgccacattttttcac

SEQ ID NO: 68 - RNA, 20 nt, synthetic construct
  source 1..20: mol_type = other RNA
  modified_base 7: mod_base = OTHER; note = 5'-methyluridine-3'-phosphate
  modified_base 9: mod_base = OTHER; note = 5'-methyluridine-3'-phosphate
  modified_base 11: mod_base = OTHER; note = 5'-methyluridine-3'-phosphate
  modified_base 12: mod_base = OTHER; note = 5'-methyluridine-3'-phosphate
agtttgtatcttggatgcca

SEQ ID NO: 69 - RNA, 20 nt, synthetic construct
  source 1..20: mol_type = other RNA
  modified_base 7: mod_base = OTHER; note = 5'-methyluridine-3'-phosphate
  modified_base 8: mod_base = OTHER; note = 5'-methyluridine-3'-phosphate
  modified_base 10: mod_base = OTHER; note = 5'-methyluridine-3'-phosphate
  modified_base 11: mod_base = OTHER; note = 5'-methyluridine-3'-phosphate
  modified_base 12: mod_base = OTHER; note = 5'-methyluridine-3'-phosphate
ctttgcttctttgagtttgt

SEQ ID NO: 70 - RNA, 20 nt, synthetic construct
  source 1..20: mol_type = other RNA
  modified_base 7: mod_base = OTHER; note = 5'-methyluridine-3'-phosphate
  modified_base 9: mod_base = OTHER; note = 5'-methyluridine-3'-phosphate
  modified_base 13: mod_base = OTHER; note = 5'-methyluridine-3'-phosphate
  modified_base 14: mod_base = OTHER; note = 5'-methyluridine-3'-phosphate
  modified_base 15: mod_base = OTHER; note = 5'-methyluridine-3'-phosphate
aatgtgtatcactttgcttc

SEQ ID NO: 71 - RNA, 20 nt, synthetic construct
  source 1..20: mol_type = other RNA
  modified_base 8: mod_base = OTHER; note = 5'-methyluridine-3'-phosphate
  modified_base 14: mod_base = OTHER; note = 5'-methyluridine-3'-phosphate
cgtctcctccaaatgtgtat

SEQ ID NO: 72 - RNA, 20 nt, synthetic construct
  source 1..20: mol_type = other RNA
  modified_base 9: mod_base = OTHER; note = 5'-methyluridine-3'-phosphate
  modified_base 10: mod_base = OTHER; note = 5'-methyluridine-3'-phosphate
  modified_base 14: mod_base = OTHER; note = 5'-methyluridine-3'-phosphate
atgctggattacgtctcctc

SEQ ID NO: 73 - RNA, 20 nt, synthetic construct
  source 1..20: mol_type = other RNA
  modified_base 6: mod_base = OTHER; note = 5'-methyluridine-3'-phosphate
  modified_base 7: mod_base = OTHER; note = 5'-methyluridine-3'-phosphate
  modified_base 12: mod_base = OTHER; note = 5'-methyluridine-3'-phosphate
  modified_base 15: mod_base = OTHER; note = 5'-methyluridine-3'-phosphate
agaagttccaatgctggatt

SEQ ID NO: 74 - RNA, 20 nt, synthetic construct
  source 1..20: mol_type = other RNA
  modified_base 11: mod_base = OTHER; note = 5'-methyluridine-3'-phosphate
tgcttgaagatcagaagttc

SEQ ID NO: 75 - RNA, 20 nt, synthetic construct
  source 1..20: mol_type = other RNA
  modified_base 7: mod_base = OTHER; note = 5'-methyluridine-3'-phosphate
  modified_base 11: mod_base = OTHER; note = 5'-methyluridine-3'-phosphate
  modified_base 14: mod_base = OTHER; note = 5'-methyluridine-3'-phosphate
  modified_base 15: mod_base = OTHER; note = 5'-methyluridine-3'-phosphate
tgagaatccctgcttgaaga

SEQ ID NO: 76 - RNA, 20 nt, synthetic construct
  source 1..20: mol_type = other RNA
  modified_base 10: mod_base = OTHER; note = 5'-methyluridine-3'-phosphate
  modified_base 11: mod_base = OTHER; note = 5'-methyluridine-3'-phosphate
aaccacaggttgagaatccc

SEQ ID NO: 77 - RNA, 20 nt, synthetic construct
  source 1..20: mol_type = other RNA
  modified_base 10: mod_base = OTHER; note = 5'-methyluridine-3'-phosphate
atgaacccctaaaccacagg

SEQ ID NO: 78 - RNA, 20 nt, synthetic construct
  source 1..20: mol_type = other RNA
  modified_base 15: mod_base = OTHER; note = 5'-methyluridine-3'-phosphate
acgctcagccccgatgaacc

SEQ ID NO: 79 - RNA, 20 nt, synthetic construct
  source 1..20: mol_type = other RNA
  modified_base 7: mod_base = OTHER; note = 5'-methyluridine-3'-phosphate
  modified_base 8: mod_base = OTHER; note = 5'-methyluridine-3'-phosphate
  modified_base 10: mod_base = OTHER; note = 5'-methyluridine-3'-phosphate
ttcctcttgtcacgctcagc

SEQ ID NO: 80 - RNA, 20 nt, synthetic construct
  source 1..20: mol_type = other RNA
  modified_base 7: mod_base = OTHER; note = 5'-methyluridine-3'-phosphate
  modified_base 8: mod_base = OTHER; note = 5'-methyluridine-3'-phosphate
  modified_base 11: mod_base = OTHER; note = 5'-methyluridine-3'-phosphate
  modified_base 12: mod_base = OTHER; note = 5'-methyluridine-3'-phosphate
  modified_base 15: mod_base = OTHER; note = 5'-methyluridine-3'-phosphate
ggcccattccttcctcttgt

SEQ ID NO: 81 - RNA, 20 nt, synthetic construct
  source 1..20: mol_type = other RNA
tgcatcccacgggcccattc

SEQ ID NO: 82 - RNA, 20 nt, synthetic construct
  source 1..20: mol_type = other RNA
  modified_base 6: mod_base = OTHER; note = 5'-methyluridine-3'-phosphate
  modified_base 7: mod_base = OTHER; note = 5'-methyluridine-3'-phosphate
  modified_base 11: mod_base = OTHER; note = 5'-methyluridine-3'-phosphate
  modified_base 15: mod_base = OTHER; note = 5'-methyluridine-3'-phosphate
ccacattgcctgcatcccac

SEQ ID NO: 83 - RNA, 20 nt, synthetic construct
  source 1..20: mol_type = other RNA
  modified_base 6: mod_base = OTHER; note = 5'-methyluridine-3'-phosphate
  modified_base 7: mod_base = OTHER; note = 5'-methyluridine-3'-phosphate
  modified_base 11: mod_base = OTHER; note = 5'-methyluridine-3'-phosphate
gccttttaagtcccacattg

SEQ ID NO: 84 - RNA, 20 nt, synthetic construct
  source 1..20: mol_type = other RNA
  modified_base 7: mod_base = OTHER; note = 5'-methyluridine-3'-phosphate
  modified_base 8: mod_base = OTHER; note = 5'-methyluridine-3'-phosphate
  modified_base 14: mod_base = OTHER; note = 5'-methyluridine-3'-phosphate
  modified_base 15: mod_base = OTHER; note = 5'-methyluridine-3'-phosphate
cagtgcttgggccttttaag

SEQ ID NO: 85 - RNA, 20 nt, synthetic construct
  source 1..20: mol_type = other RNA
  modified_base 8: mod_base = OTHER; note = 5'-methyluridine-3'-phosphate
  modified_base 9: mod_base = OTHER; note = 5'-methyluridine-3'-phosphate
  modified_base 10: mod_base = OTHER; note = 5'-methyluridine-3'-phosphate
  modified_base 11: mod_base = OTHER; note = 5'-methyluridine-3'-phosphate
  modified_base 15: mod_base = OTHER; note = 5'-methyluridine-3'-phosphate
ggttccattttcagtgcttg

SEQ ID NO: 86 - RNA, 20 nt, synthetic construct
  source 1..20: mol_type = other RNA
  modified_base 6: mod_base = OTHER; note = 5'-methyluridine-3'-phosphate
  modified_base 14: mod_base = OTHER; note = 5'-methyluridine-3'-phosphate
  modified_base 15: mod_base = OTHER; note = 5'-methyluridine-3'-phosphate
tgctttcgccaggttccatt

SEQ ID NO: 87 - RNA, 20 nt, synthetic construct
  source 1..20: mol_type = other RNA
  modified_base 6: mod_base = OTHER; note = 5'-methyluridine-3'-phosphate
  modified_base 9: mod_base = OTHER; note = 5'-methyluridine-3'-phosphate
  modified_base 12: mod_base = OTHER; note = 5'-methyluridine-3'-phosphate
  modified_base 14: mod_base = OTHER; note = 5'-methyluridine-3'-phosphate
cattctcctcctctgctttc

SEQ ID NO: 88 - RNA, 20 nt, synthetic construct
  source 1..20: mol_type = other RNA
  modified_base 6: mod_base = OTHER; note = 5'-methyluridine-3'-phosphate
  modified_base 7: mod_base = OTHER; note = 5'-methyluridine-3'-phosphate
  modified_base 9: mod_base = OTHER; note = 5'-methyluridine-3'-phosphate
  modified_base 10: mod_base = OTHER; note = 5'-methyluridine-3'-phosphate
  modified_base 13: mod_base = OTHER; note = 5'-methyluridine-3'-phosphate
  modified_base 14: mod_base = OTHER; note = 5'-methyluridine-3'-phosphate
catctttcttcattctcctc

SEQ ID NO: 89 - RNA, 20 nt, synthetic construct
  source 1..20: mol_type = other RNA
  modified_base 6: mod_base = OTHER; note = 5'-methyluridine-3'-phosphate
  modified_base 7: mod_base = OTHER; note = 5'-methyluridine-3'-phosphate
  modified_base 11: mod_base = OTHER; note = 5'-methyluridine-3'-phosphate
  modified_base 15: mod_base = OTHER; note = 5'-methyluridine-3'-phosphate
cctgtttgactccatctttc

SEQ ID NO: 90 - RNA, 20 nt, synthetic construct
  source 1..20: mol_type = other RNA
  modified_base 9: mod_base = OTHER; note = 5'-methyluridine-3'-phosphate
  modified_base 13: mod_base = OTHER; note = 5'-methyluridine-3'-phosphate
  modified_base 15: mod_base = OTHER; note = 5'-methyluridine-3'-phosphate
ctccaggctccctgtttgac

SEQ ID NO: 91 - RNA, 20 nt, synthetic construct
  source 1..20: mol_type = other RNA
  modified_base 6: mod_base = OTHER; note = 5'-methyluridine-3'-phosphate
  modified_base 8: mod_base = OTHER; note = 5'-methyluridine-3'-phosphate
  modified_base 12: mod_base = OTHER; note = 5'-methyluridine-3'-phosphate
caaggtctccctccaggctc

SEQ ID NO: 92 - RNA, 20 nt, synthetic construct
  source 1..20: mol_type = other RNA
  modified_base 10: mod_base = OTHER; note = 5'-methyluridine-3'-phosphate
  modified_base 12: mod_base = OTHER; note = 5'-methyluridine-3'-phosphate
atttgaaagtatcaaggtct

SEQ ID NO: 93 - RNA, 20 nt, synthetic construct
  source 1..20: mol_type = other RNA
  modified_base 7: mod_base = OTHER; note = 5'-methyluridine-3'-phosphate
  modified_base 14: mod_base = OTHER; note = 5'-methyluridine-3'-phosphate
  modified_base 15: mod_base = OTHER; note = 5'-methyluridine-3'-phosphate
agcccctcaggcatttgaaa

SEQ ID NO: 94 - RNA, 20 nt, synthetic construct
  source 1..20: mol_type = other RNA
  modified_base 6: mod_base = OTHER; note = 5'-methyluridine-3'-phosphate
  modified_base 10: mod_base = OTHER; note = 5'-methyluridine-3'-phosphate
aggcgtcgatgagcccctca

SEQ ID NO: 95 - RNA, 20 nt, synthetic construct
  source 1..20: mol_type = other RNA
  modified_base 6: mod_base = OTHER; note = 5'-methyluridine-3'-phosphate
  modified_base 15: mod_base = OTHER; note = 5'-methyluridine-3'-phosphate
ccctgtcacaggcgtcgatg

SEQ ID NO: 96 - RNA, 20 nt, synthetic construct
  source 1..20: mol_type = other RNA
  modified_base 6: mod_base = OTHER; note = 5'-methyluridine-3'-phosphate
  modified_base 9: mod_base = OTHER; note = 5'-methyluridine-3'-phosphate
  modified_base 10: mod_base = OTHER; note = 5'-methyluridine-3'-phosphate
  modified_base 11: mod_base = OTHER; note = 5'-methyluridine-3'-phosphate
  modified_base 13: mod_base = OTHER; note = 5'-methyluridine-3'-phosphate
aagtatcctttctccctgtc

SEQ ID NO: 97 - RNA, 20 nt, synthetic construct
  source 1..20: mol_type = other RNA
  modified_base 6: mod_base = OTHER; note = 5'-methyluridine-3'-phosphate
  modified_base 13: mod_base = OTHER; note = 5'-methyluridine-3'-phosphate
  modified_base 15: mod_base = OTHER; note = 5'-methyluridine-3'-phosphate
cttgttcagaagtatccttt

SEQ ID NO: 98 - RNA, 20 nt, synthetic construct
  source 1..20: mol_type = other RNA
  modified_base 12: mod_base = OTHER; note = 5'-methyluridine-3'-phosphate
  modified_base 15: mod_base = OTHER; note = 5'-methyluridine-3'-phosphate
tgcttggaggctccttgttc

SEQ ID NO: 99 - RNA, 20 nt, synthetic construct
  source 1..20: mol_type = other RNA
  modified_base 7: mod_base = OTHER; note = 5'-methyluridine-3'-phosphate
  modified_base 10: mod_base = OTHER; note = 5'-methyluridine-3'-phosphate
  modified_base 11: mod_base = OTHER; note = 5'-methyluridine-3'-phosphate
  modified_base 12: mod_base = OTHER; note = 5'-methyluridine-3'-phosphate
  modified_base 15: mod_base = OTHER; note = 5'-methyluridine-3'-phosphate
aatggatgatttgcttggag

SEQ ID NO: 100 - RNA, 20 nt, synthetic construct
  source 1..20: mol_type = other RNA
  modified_base 6: mod_base = OTHER; note = 5'-methyluridine-3'-phosphate
  modified_base 13: mod_base = OTHER; note = 5'-methyluridine-3'-phosphate
taggatgagcaatggatgat

SEQ ID NO: 101 - RNA, 20 nt, synthetic construct
  source 1..20: mol_type = other RNA
  modified_base 7: mod_base = OTHER; note = 5'-methyluridine-3'-phosphate
  modified_base 9: mod_base = OTHER; note = 5'-methyluridine-3'-phosphate
  modified_base 10: mod_base = OTHER; note = 5'-methyluridine-3'-phosphate
  modified_base 13: mod_base = OTHER; note = 5'-methyluridine-3'-phosphate
aacccgtcttcctaggatga

SEQ ID NO: 102 - RNA, 20 nt, synthetic construct
  source 1..20: mol_type = other RNA
  modified_base 6: mod_base = OTHER; note = 5'-methyluridine-3'-phosphate
  modified_base 7: mod_base = OTHER; note = 5'-methyluridine-3'-phosphate
  modified_base 9: mod_base = OTHER; note = 5'-methyluridine-3'-phosphate
agggattctcaacccgtctt

SEQ ID NO: 103 - RNA, 20 nt, synthetic construct
  source 1..20: mol_type = other RNA
  modified_base 10: mod_base = OTHER; note = 5'-methyluridine-3'-phosphate
  modified_base 11: mod_base = OTHER; note = 5'-methyluridine-3'-phosphate
accctcaaattagggattct

SEQ ID NO: 104 - RNA, 20 nt, synthetic construct
  source 1..20: mol_type = other RNA
  modified_base 9: mod_base = OTHER; note = 5'-methyluridine-3'-phosphate
  modified_base 15: mod_base = OTHER; note = 5'-methyluridine-3'-phosphate
gcaggaactgaccctcaaat

SEQ ID NO: 105 - RNA, 20 nt, synthetic construct
  source 1..20: mol_type = other RNA
  modified_base 9: mod_base = OTHER; note = 5'-methyluridine-3'-phosphate
  modified_base 10: mod_base = OTHER; note = 5'-methyluridine-3'-phosphate
  modified_base 12: mod_base = OTHER; note = 5'-methyluridine-3'-phosphate
aagggcacttctgcaggaac

SEQ ID NO: 106 - RNA, 20 nt, synthetic construct
  source 1..20: mol_type = other RNA
agtggaggcaaagggcactt

SEQ ID NO: 107 - RNA, 20 nt, synthetic construct
  source 1..20: mol_type = other RNA
  modified_base 11: mod_base = OTHER; note = 5'-methyluridine-3'-phosphate
  modified_base 12: mod_base = OTHER; note = 5'-methyluridine-3'-phosphate
aattgaggcattgagtggag

SEQ ID NO: 108 - RNA, 20 nt, synthetic construct
  source 1..20: mol_type = other RNA
  modified_base 12: mod_base = OTHER; note = 5'-methyluridine-3'-phosphate
  modified_base 13: mod_base = OTHER; note = 5'-methyluridine-3'-phosphate
cagaaaacaaattgaggcat

SEQ ID NO: 109 - RNA, 20 nt, synthetic construct
  source 1..20: mol_type = other RNA
  modified_base 9: mod_base = OTHER; note = 5'-methyluridine-3'-phosphate
  modified_base 12: mod_base = OTHER; note = 5'-methyluridine-3'-phosphate
actctcagtcatgcagaaaa

SEQ ID NO: 110 - RNA, 20 nt, synthetic construct
  source 1..20: mol_type = other RNA
  modified_base 6: mod_base = OTHER; note = 5'-methyluridine-3'-phosphate
  modified_base 12: mod_base = OTHER; note = 5'-methyluridine-3'-phosphate
  modified_base 14: mod_base = OTHER; note = 5'-methyluridine-3'-phosphate
aacactgagactctcagtca

SEQ ID NO: 111 - RNA, 20 nt, synthetic construct
  source 1..20: mol_type = other RNA
  modified_base 10: mod_base = OTHER; note = 5'-methyluridine-3'-phosphate
  modified_base 11: mod_base = OTHER; note = 5'-methyluridine-3'-phosphate
actgtcccgttccaacactg

SEQ ID NO: 112 - RNA, 20 nt, synthetic construct
  source 1..20: mol_type = other RNA
  modified_base 6: mod_base = OTHER; note = 5'-methyluridine-3'-phosphate
  modified_base 10: mod_base = OTHER; note = 5'-methyluridine-3'-phosphate
  modified_base 13: mod_base = OTHER; note = 5'-methyluridine-3'-phosphate
  modified_base 15: mod_base = OTHER; note = 5'-methyluridine-3'-phosphate
atacataaatactgtcccgt

SEQ ID NO: 113 - RNA, 20 nt, synthetic construct
  source 1..20: mol_type = other RNA
  modified_base 10: mod_base = OTHER; note = 5'-methyluridine-3'-phosphate
  modified_base 13: mod_base = OTHER; note = 5'-methyluridine-3'-phosphate
aggaaaaactcatacataaa

SEQ ID NO: 114 - RNA, 20 nt, synthetic construct
  source 1..20: mol_type = other RNA
  modified_base 8: mod_base = OTHER; note = 5'-methyluridine-3'-phosphate
  modified_base 12: mod_base = OTHER; note = 5'-methyluridine-3'-phosphate
ctcaaaataaataggaaaaa

SEQ ID NO: 115 - RNA, 20 nt, synthetic construct
  source 1..20: mol_type = other RNA
  modified_base 12: mod_base = OTHER; note = 5'-methyluridine-3'-phosphate
acctcacagactcaaaataa

SEQ ID NO: 116 - RNA, 20 nt, synthetic construct
  source 1..20: mol_type = other RNA
  modified_base 15: mod_base = OTHER; note = 5'-methyluridine-3'-phosphate
atgacaagaagacctcacag

SEQ ID NO: 117 - RNA, 20 nt, synthetic construct
  source 1..20: mol_type = other RNA
  modified_base 9: mod_base = OTHER; note = 5'-methyluridine-3'-phosphate
  modified_base 14: mod_base = OTHER; note = 5'-methyluridine-3'-phosphate
aaccacactcacatgacaag

SEQ ID NO: 118 - RNA, 20 nt, synthetic construct
  source 1..20: mol_type = other RNA
  modified_base 6: mod_base = OTHER; note = 5'-methyluridine-3'-phosphate
  modified_base 7: mod_base = OTHER; note = 5'-methyluridine-3'-phosphate
aatcattcacaaccacactc

SEQ ID NO: 119 - RNA, 20 nt, synthetic construct
  source 1..20: mol_type = other RNA
  modified_base 15: mod_base = OTHER; note = 5'-methyluridine-3'-phosphate
atcttcaaaagaaatcattc

SEQ ID NO: 120 - RNA, 20 nt, synthetic construct
  source 1..20: mol_type = other RNA
  modified_base 8: mod_base = OTHER; note = 5'-methyluridine-3'-phosphate
  modified_base 10: mod_base = OTHER; note = 5'-methyluridine-3'-phosphate
  modified_base 12: mod_base = OTHER; note = 5'-methyluridine-3'-phosphate
  modified_base 14: mod_base = OTHER; note = 5'-methyluridine-3'-phosphate
  modified_base 15: mod_base = OTHER; note = 5'-methyluridine-3'-phosphate
actacaatatatcttcaaaa

SEQ ID NO: 121 - RNA, 20 nt, synthetic construct
  source 1..20: mol_type = other RNA
  modified_base 10: mod_base = OTHER; note = 5'-methyluridine-3'-phosphate
  modified_base 12: mod_base = OTHER; note = 5'-methyluridine-3'-phosphate
  modified_base 15: mod_base = OTHER; note = 5'-methyluridine-3'-phosphate
attgtaacatctactacaat

SEQ ID NO: 122 - RNA, 20 nt, synthetic construct
  source 1..20: mol_type = other RNA
  modified_base 12: mod_base = OTHER; note = 5'-methyluridine-3'-phosphate
  modified_base 13: mod_base = OTHER; note = 5'-methyluridine-3'-phosphate
  modified_base 15: mod_base = OTHER; note = 5'-methyluridine-3'-phosphate
tggcgacaaaattgtaacat

SEQ ID NO: 123 - RNA, 20 nt, synthetic construct
  source 1..20: mol_type = other RNA
  modified_base 6: mod_base = OTHER; note = 5'-methyluridine-3'-phosphate
  modified_base 9: mod_base = OTHER; note = 5'-methyluridine-3'-phosphate
  modified_base 10: mod_base = OTHER; note = 5'-methyluridine-3'-phosphate
  modified_base 11: mod_base = OTHER; note = 5'-methyluridine-3'-phosphate
aagtttagtttggcgacaaa

SEQ ID NO: 124 - RNA, 20 nt, synthetic construct
  source 1..20: mol_type = other RNA
  modified_base 6: mod_base = OTHER; note = 5'-methyluridine-3'-phosphate
atcattaagcagcaagttta

SEQ ID NO: 125 - RNA, 20 nt, synthetic construct
  source 1..20: mol_type = other RNA
  modified_base 13: mod_base = OTHER; note = 5'-methyluridine-3'-phosphate
gatgtgagcaaatcattaag

SEQ ID NO: 126 - RNA, 20 nt, synthetic construct
  source 1..20: mol_type = other RNA
  modified_base 6: mod_base = OTHER; note = 5'-methyluridine-3'-phosphate
  modified_base 7: mod_base = OTHER; note = 5'-methyluridine-3'-phosphate
  modified_base 10: mod_base = OTHER; note = 5'-methyluridine-3'-phosphate
  modified_base 14: mod_base = OTHER; note = 5'-methyluridine-3'-phosphate
atgttttactagatgtgagc

SEQ ID NO: 127 - RNA, 20 nt, synthetic construct
  source 1..20: mol_type = other RNA
  modified_base 6: mod_base = OTHER; note = 5'-methyluridine-3'-phosphate
  modified_base 9: mod_base = OTHER; note = 5'-methyluridine-3'-phosphate
  modified_base 13: mod_base = OTHER; note = 5'-methyluridine-3'-phosphate
  modified_base 15: mod_base = OTHER; note = 5'-methyluridine-3'-phosphate
acaaatactccatgttttac

SEQ ID NO: 128 - RNA, 20 nt, synthetic construct
  source 1..20: mol_type = other RNA
  modified_base 8: mod_base = OTHER; note = 5'-methyluridine-3'-phosphate
  modified_base 9: mod_base = OTHER; note = 5'-methyluridine-3'-phosphate
  modified_base 15: mod_base = OTHER; note = 5'-methyluridine-3'-phosphate
aagcaccttacaaatactcc

SEQ ID NO: 129 - RNA, 20 nt, synthetic construct
  source 1..20: mol_type = other RNA
tagaggagaccaagcacctt

SEQ ID NO: 130 - RNA, 20 nt, synthetic construct
  source 1..20: mol_type = other RNA
  modified_base 6: mod_base = OTHER; note = 5'-methyluridine-3'-phosphate
  modified_base 8: mod_base = OTHER; note = 5'-methyluridine-3'-phosphate
  modified_base 11: mod_base = OTHER; note = 5'-methyluridine-3'-phosphate
  modified_base 12: mod_base = OTHER; note = 5'-methyluridine-3'-phosphate
  modified_base 14: mod_base = OTHER; note = 5'-methyluridine-3'-phosphate
atacttgtagttatagagga

SEQ ID NO: 131 - RNA, 20 nt, synthetic construct
  source 1..20: mol_type = other RNA
  modified_base 9: mod_base = OTHER; note = 5'-methyluridine-3'-phosphate
  modified_base 11: mod_base = OTHER; note = 5'-methyluridine-3'-phosphate
  modified_base 13: mod_base = OTHER; note = 5'-methyluridine-3'-phosphate
gcttccaatgtatacttgta

SEQ ID NO: 132 - RNA, 20 nt, synthetic construct
  source 1..20: mol_type = other RNA
  modified_base 7: mod_base = OTHER; note = 5'-methyluridine-3'-phosphate
  modified_base 8: mod_base = OTHER; note = 5'-methyluridine-3'-phosphate
  modified_base 9: mod_base = OTHER; note = 5'-methyluridine-3'-phosphate
  modified_base 11: mod_base = OTHER; note = 5'-methyluridine-3'-phosphate
  modified_base 14: mod_base = OTHER; note = 5'-methyluridine-3'-phosphate
  modified_base 15: mod_base = OTHER; note = 5'-methyluridine-3'-phosphate
ttgatctttatgcttccaat

SEQ ID NO: 133 - RNA, 20 nt, synthetic construct
  source 1..20: mol_type = other RNA
  modified_base 9: mod_base = OTHER; note = 5'-methyluridine-3'-phosphate
  modified_base 10: mod_base = OTHER; note = 5'-methyluridine-3'-phosphate
  modified_base 11: mod_base = OTHER; note = 5'-methyluridine-3'-phosphate
  modified_base 14: mod_base = OTHER; note = 5'-methyluridine-3'-phosphate
accaacggtttgatctttat

SEQ ID NO: 134 - RNA, 20 nt, synthetic construct
  source 1..20: mol_type = other RNA
  modified_base 7: mod_base = OTHER; note = 5'-methyluridine-3'-phosphate
  modified_base 9: mod_base = OTHER; note = 5'-methyluridine-3'-phosphate
acatcctatgcaaccaacgg

SEQ ID NO: 135 - RNA, 20 nt, synthetic construct
  source 1..20: mol_type = other RNA
  modified_base 10: mod_base = OTHER; note = 5'-methyluridine-3'-phosphate
  modified_base 15: mod_base = OTHER; note = 5'-methyluridine-3'-phosphate
aaataaaggtgacatcctat

SEQ ID NO: 136 - RNA, 20 nt, synthetic construct
  source 1..20: mol_type = other RNA
  modified_base 7: mod_base = OTHER; note = 5'-methyluridine-3'-phosphate
  modified_base 11: mod_base = OTHER; note = 5'-methyluridine-3'-phosphate
  modified_base 12: mod_base = OTHER; note = 5'-methyluridine-3'-phosphate
tattaatgggttaaataaag

SEQ ID NO: 137 - RNA, 20 nt, synthetic construct
  source 1..20: mol_type = other RNA
  modified_base 11: mod_base = OTHER; note = 5'-methyluridine-3'-phosphate
  modified_base 13: mod_base = OTHER; note = 5'-methyluridine-3'-phosphate
  modified_base 14: mod_base = OTHER; note = 5'-methyluridine-3'-phosphate
tcaaccagagtattaatggg

SEQ ID NO: 138 - RNA, 20 nt, synthetic construct
  source 1..20: mol_type = other RNA
  modified_base 8: mod_base = OTHER; note = 5'-methyluridine-3'-phosphate
  modified_base 9: mod_base = OTHER; note = 5'-methyluridine-3'-phosphate
  modified_base 13: mod_base = OTHER; note = 5'-methyluridine-3'-phosphate
aataagattaggtcaaccag

SEQ ID NO: 139 - RNA, 20 nt, synthetic construct
  source 1..20: mol_type = other RNA
  modified_base 6: mod_base = OTHER; note = 5'-methyluridine-3'-phosphate
  modified_base 12: mod_base = OTHER; note = 5'-methyluridine-3'-phosphate
aggtctgagaataagattag

SEQ ID NO: 140 - RNA, 20 nt, synthetic construct
  source 1..20: mol_type = other RNA
  modified_base 9: mod_base = OTHER; note = 5'-methyluridine-3'-phosphate
  modified_base 10: mod_base = OTHER; note = 5'-methyluridine-3'-phosphate
  modified_base 15: mod_base = OTHER; note = 5'-methyluridine-3'-phosphate
acagacacttgaggtctgag

SEQ ID NO: 141 - RNA, 20 nt, synthetic construct
  source 1..20: mol_type = other RNA
  modified_base 7: mod_base = OTHER; note = 5'-methyluridine-3'-phosphate
  modified_base 10: mod_base = OTHER; note = 5'-methyluridine-3'-phosphate
aacagatactgcacagacac

SEQ ID NO: 142 - RNA, 20 nt, synthetic construct
  source 1..20: mol_type = other RNA
  modified_base 6: mod_base = OTHER; note = 5'-methyluridine-3'-phosphate
  modified_base 10: mod_base = OTHER; note = 5'-methyluridine-3'-phosphate
atatttaaatggaacagata

SEQ ID NO: 143 - RNA, 20 nt, synthetic construct
  source 1..20: mol_type = other RNA
  modified_base 10: mod_base = OTHER; note = 5'-methyluridine-3'-phosphate
  modified_base 13: mod_base = OTHER; note = 5'-methyluridine-3'-phosphate
  modified_base 15: mod_base = OTHER; note = 5'-methyluridine-3'-phosphate
ttgtaaagctgatatttaaa

SEQ ID NO: 144 - RNA, 20 nt, synthetic construct
  source 1..20: mol_type = other RNA
  modified_base 7: mod_base = OTHER; note = 5'-methyluridine-3'-phosphate
  modified_base 10: mod_base = OTHER; note = 5'-methyluridine-3'-phosphate
  modified_base 11: mod_base = OTHER; note = 5'-methyluridine-3'-phosphate
  modified_base 13: mod_base = OTHER; note = 5'-methyluridine-3'-phosphate
accacataattgtaaagctg

SEQ ID NO: 145 - RNA, 20 nt, synthetic construct
  source 1..20: mol_type = other RNA
  modified_base 6: mod_base = OTHER; note = 5'-methyluridine-3'-phosphate
  modified_base 8: mod_base = OTHER; note = 5'-methyluridine-3'-phosphate
  modified_base 13: mod_base = OTHER; note = 5'-methyluridine-3'-phosphate
atgtgtgtaggctaccacat

SEQ ID NO: 146 - RNA, 20 nt, synthetic construct
  source 1..20: mol_type = other RNA
  modified_base 9: mod_base = OTHER; note = 5'-methyluridine-3'-phosphate
  modified_base 10: mod_base = OTHER; note = 5'-methyluridine-3'-phosphate
  modified_base 12: mod_base = OTHER; note = 5'-methyluridine-3'-phosphate
  modified_base 14: mod_base = OTHER; note = 5'-methyluridine-3'-phosphate
aaatgagattatgtgtgtag

SEQ ID NO: 147 - RNA, 20 nt, synthetic construct
  source 1..20: mol_type = other RNA
  modified_base 10: mod_base = OTHER; note = 5'-methyluridine-3'-phosphate
  modified_base 15: mod_base = OTHER; note = 5'-methyluridine-3'-phosphate
ttacagcgatgaaatgagat

SEQ ID NO: 148 - RNA, 20 nt, synthetic construct
  source 1..20: mol_type = other RNA
  modified_base 8: mod_base = OTHER; note = 5'-methyluridine-3'-phosphate
  modified_base 11: mod_base = OTHER; note = 5'-methyluridine-3'-phosphate
  modified_base 12: mod_base = OTHER; note = 5'-methyluridine-3'-phosphate
aacagggtggttacagcgat

SEQ ID NO: 149 - RNA, 20 nt, synthetic construct
  source 1..20: mol_type = other RNA
  modified_base 6: mod_base = OTHER; note = 5'-methyluridine-3'-phosphate
  modified_base 7: mod_base = OTHER; note = 5'-methyluridine-3'-phosphate
  modified_base 9: mod_base = OTHER; note = 5'-methyluridine-3'-phosphate
agtggttatcacaacagggt

SEQ ID NO: 150 - RNA, 20 nt, synthetic construct
  source 1..20: mol_type = other RNA
  modified_base 8: mod_base = OTHER; note = 5'-methyluridine-3'-phosphate
  modified_base 11: mod_base = OTHER; note = 5'-methyluridine-3'-phosphate
  modified_base 14: mod_base = OTHER; note = 5'-methyluridine-3'-phosphate
ggtaaaataatagtggttat

SEQ ID NO: 151 - RNA, 20 nt, synthetic construct
  source 1..20: mol_type = other RNA
  modified_base 6: mod_base = OTHER; note = 5'-methyluridine-3'-phosphate
  modified_base 11: mod_base = OTHER; note = 5'-methyluridine-3'-phosphate
  modified_base 15: mod_base = OTHER; note = 5'-methyluridine-3'-phosphate
agctgtacgatgggtaaaat

SEQ ID NO: 152 - RNA, 20 nt, synthetic construct
  source 1..20: mol_type = other RNA
  modified_base 6: mod_base = OTHER; note = 5'-methyluridine-3'-phosphate
  modified_base 9: mod_base = OTHER; note = 5'-methyluridine-3'-phosphate
  modified_base 14: mod_base = OTHER; note = 5'-methyluridine-3'-phosphate
ttgcttcctcagctgtacga

SEQ ID NO: 153 - RNA, 20 nt, synthetic construct
  source 1..20: mol_type = other RNA
  modified_base 6: mod_base = OTHER; note = 5'-methyluridine-3'-phosphate
  modified_base 8: mod_base = OTHER; note = 5'-methyluridine-3'-phosphate
  modified_base 10: mod_base = OTHER; note = 5'-methyluridine-3'-phosphate
  modified_base 11: mod_base = OTHER; note = 5'-methyluridine-3'-phosphate
  modified_base 12: mod_base = OTHER; note = 5'-methyluridine-3'-phosphate
  modified_base 15: mod_base = OTHER; note = 5'-methyluridine-3'-phosphate
cttaatctgtttgcttcctc

SEQ ID NO: 154 - RNA, 20 nt, synthetic construct
  source 1..20: mol_type = other RNA
  modified_base 9: mod_base = OTHER; note = 5'-methyluridine-3'-phosphate
  modified_base 10: mod_base = OTHER; note = 5'-methyluridine-3'-phosphate
  modified_base 13: mod_base = OTHER; note = 5'-methyluridine-3'-phosphate
  modified_base 14: mod_base = OTHER; note = 5'-methyluridine-3'-phosphate
tgggcaagttacttaatctg

SEQ ID NO: 155 - RNA, 20 nt, synthetic construct
  source 1..20: mol_type = other RNA
  modified_base 8: mod_base = OTHER; note = 5'-methyluridine-3'-phosphate
  modified_base 11: mod_base = OTHER; note = 5'-methyluridine-3'-phosphate
  modified_base 12: mod_base = OTHER; note = 5'-methyluridine-3'-phosphate
  modified_base 13: mod_base = OTHER; note = 5'-methyluridine-3'-phosphate
tatttactggtttgggcaag

SEQ ID NO: 156 - RNA, 20 nt, synthetic construct
  source 1..20: mol_type = other RNA
  modified_base 6: mod_base = OTHER; note = 5'-methyluridine-3'-phosphate
  modified_base 8: mod_base = OTHER; note = 5'-methyluridine-3'-phosphate
  modified_base 11: mod_base = OTHER; note = 5'-methyluridine-3'-phosphate
  modified_base 13: mod_base = OTHER; note = 5'-methyluridine-3'-phosphate
  modified_base 14: mod_base = OTHER; note = 5'-methyluridine-3'-phosphate
  modified_base 15: mod_base = OTHER; note = 5'-methyluridine-3'-phosphate
tgaggtctgctatttactgg

SEQ ID NO: 157 - RNA, 20 nt, synthetic construct
  source 1..20: mol_type = other RNA
  modified_base 6: mod_base = OTHER; note = 5'-methyluridine-3'-phosphate
  modified_base 12: mod_base = OTHER; note = 5'-methyluridine-3'-phosphate
  modified_base 14: mod_base = OTHER; note = 5'-methyluridine-3'-phosphate
gtgggtggcagtctgaggtc

SEQ ID NO: 158 - RNA, 20 nt, synthetic construct
  source 1..20: mol_type = other RNA
  modified_base 11: mod_base = OTHER; note = 5'-methyluridine-3'-phosphate
  modified_base 15: mod_base = OTHER; note = 5'-methyluridine-3'-phosphate
aaaaggacagtgggtggcag

SEQ ID NO: 159 - RNA, 20 nt, synthetic construct
  source 1..20: mol_type = other RNA
  modified_base 7: mod_base = OTHER; note = 5'-methyluridine-3'-phosphate
  modified_base 9: mod_base = OTHER; note = 5'-methyluridine-3'-phosphate
  modified_base 10: mod_base = OTHER; note = 5'-methyluridine-3'-phosphate
  modified_base 12: mod_base = OTHER; note = 5'-methyluridine-3'-phosphate
aaattgtattataaaaggac

SEQ ID NO: 160 - RNA, 20 nt, synthetic construct
  source 1..20: mol_type = other RNA
  modified_base 9: mod_base = OTHER; note = 5'-methyluridine-3'-phosphate
  modified_base 11: mod_base = OTHER; note = 5'-methyluridine-3'-phosphate
  modified_base 15: mod_base = OTHER; note = 5'-methyluridine-3'-phosphate
aatatagctgtaaattgtat

SEQ ID NO: 161 - RNA, 20 nt, synthetic construct
  source 1..20: mol_type = other RNA
  modified_base 10: mod_base = OTHER; note = 5'-methyluridine-3'-phosphate
  modified_base 15: mod_base = OTHER; note = 5'-methyluridine-3'-phosphate
tgcttaaagtaaaatatagc

SEQ ID NO: 162 - RNA, 20 nt, synthetic construct
  source 1..20: mol_type = other RNA
  modified_base 11: mod_base = OTHER; note = 5'-methyluridine-3'-phosphate
  modified_base 12: mod_base = OTHER; note = 5'-methyluridine-3'-phosphate
  modified_base 15: mod_base = OTHER; note = 5'-methyluridine-3'-phosphate
aataaaagaattgcttaaag

SEQ ID NO: 163 - RNA, 20 nt, synthetic construct
  source 1..20: mol_type = other RNA
  modified_base 6: mod_base = OTHER; note = 5'-methyluridine-3'-phosphate
  modified_base 7: mod_base = OTHER; note = 5'-methyluridine-3'-phosphate
  modified_base 8: mod_base = OTHER; note = 5'-methyluridine-3'-phosphate
  modified_base 9: mod_base = OTHER; note = 5'-methyluridine-3'-phosphate
  modified_base 10: mod_base = OTHER; note = 5'-methyluridine-3'-phosphate
  modified_base 14: mod_base = OTHER; note = 5'-methyluridine-3'-phosphate
aatggtttttgaataaaaga

SEQ ID NO: 164 - RNA, 20 nt, synthetic construct
  source 1..20: mol_type = other RNA
  modified_base 6: mod_base = OTHER; note = 5'-methyluridine-3'-phosphate
  modified_base 9: mod_base = OTHER; note = 5'-methyluridine-3'-phosphate
  modified_base 13: mod_base = OTHER; note = 5'-methyluridine-3'-phosphate
gcacttaataaatggttttt

SEQ ID NO: 165 - RNA, 20 nt, synthetic construct
  source 1..20: mol_type = other RNA
atattgcaagggcacttaat

SEQ ID NO: 166 - RNA, 20 nt, synthetic construct
  source 1..20: mol_type = other RNA
  modified_base 8: mod_base = OTHER; note = 5'-methyluridine-3'-phosphate
  modified_base 9: mod_base = OTHER; note = 5'-methyluridine-3'-phosphate
  modified_base 12: mod_base = OTHER; note = 5'-methyluridine-3'-phosphate
  modified_base 14: mod_base = OTHER; note = 5'-methyluridine-3'-phosphate
  modified_base 15: mod_base = OTHER; note = 5'-methyluridine-3'-phosphate
acagcgattgatattgcaag

SEQ ID NO: 167 - RNA, 20 nt, synthetic construct
  source 1..20: mol_type = other RNA
  modified_base 6: mod_base = OTHER; note = 5'-methyluridine-3'-phosphate
  modified_base 10: mod_base = OTHER; note = 5'-methyluridine-3'-phosphate
ttcaatgcctggcacagcga

SEQ ID NO: 168 - RNA, 20 nt, synthetic construct
  source 1..20: mol_type = other RNA
  modified_base 6: mod_base = OTHER; note = 5'-methyluridine-3'-phosphate
  modified_base 10: mod_base = OTHER; note = 5'-methyluridine-3'-phosphate
  modified_base 11: mod_base = OTHER; note = 5'-methyluridine-3'-phosphate
  modified_base 15: mod_base = OTHER; note = 5'-methyluridine-3'-phosphate
atctgtagattcaatgcctg

SEQ ID NO: 169 - RNA, 20 nt, synthetic construct
  source 1..20: mol_type = other RNA
  modified_base 6: mod_base = OTHER; note = 5'-methyluridine-3'-phosphate
  modified_base 9: mod_base = OTHER; note = 5'-methyluridine-3'-phosphate
  modified_base 14: mod_base = OTHER; note = 5'-methyluridine-3'-phosphate
tgtcttgctcacatctgtag

SEQ ID NO: 170 - RNA, 20 nt, synthetic construct
  source 1..20: mol_type = other RNA
  modified_base 6: mod_base = OTHER; note = 5'-methyluridine-3'-phosphate
  modified_base 9: mod_base = OTHER; note = 5'-methyluridine-3'-phosphate
  modified_base 10: mod_base = OTHER; note = 5'-methyluridine-3'-phosphate
  modified_base 11: mod_base = OTHER; note = 5'-methyluridine-3'-phosphate
  modified_base 13: mod_base = OTHER; note = 5'-methyluridine-3'-phosphate
  modified_base 15: mod_base = OTHER; note = 5'-methyluridine-3'-phosphate
acaggtactttgtcttgctc

SEQ ID NO: 171 - RNA, 20 nt, synthetic construct
  source 1..20: mol_type = other RNA
  modified_base 7: mod_base = OTHER; note = 5'-methyluridine-3'-phosphate
  modified_base 8: mod_base = OTHER; note = 5'-methyluridine-3'-phosphate
agctccttgaggacaggtac

SEQ ID NO: 172 - RNA, 20 nt, synthetic construct
  source 1..20: mol_type = other RNA
  modified_base 8: mod_base = OTHER; note = 5'-methyluridine-3'-phosphate
  modified_base 10: mod_base = OTHER; note = 5'-methyluridine-3'-phosphate
  modified_base 15: mod_base = OTHER; note = 5'-methyluridine-3'-phosphate
attatactatgagctccttg

SEQ ID NO: 173 - RNA, 20 nt, synthetic construct
  source 1..20: mol_type = other RNA
  modified_base 6: mod_base = OTHER; note = 5'-methyluridine-3'-phosphate
  modified_base 9: mod_base = OTHER; note = 5'-methyluridine-3'-phosphate
  modified_base 12: mod_base = OTHER; note = 5'-methyluridine-3'-phosphate
  modified_base 13: mod_base = OTHER; note = 5'-methyluridine-3'-phosphate
  modified_base 15: mod_base = OTHER; note = 5'-methyluridine-3'-phosphate
taatctcctcattatactat

SEQ ID NO: 174 - RNA, 20 nt, synthetic construct
  source 1..20: mol_type = other RNA
  modified_base 6: mod_base = OTHER; note = 5'-methyluridine-3'-phosphate
  modified_base 7: mod_base = OTHER; note = 5'-methyluridine-3'-phosphate
  modified_base 9: mod_base = OTHER; note = 5'-methyluridine-3'-phosphate
  modified_base 10: mod_base = OTHER; note = 5'-methyluridine-3'-phosphate
  modified_base 12: mod_base = OTHER; note = 5'-methyluridine-3'-phosphate
  modified_base 13: mod_base = OTHER; note = 5'-methyluridine-3'-phosphate
acattttcttgttaatctcc

SEQ ID NO: 175 - RNA, 20 nt, synthetic construct
  source 1..20: mol_type = other RNA
  modified_base 6: mod_base = OTHER; note = 5'-methyluridine-3'-phosphate
  modified_base 9: mod_base = OTHER; note = 5'-methyluridine-3'-phosphate
  modified_base 12: mod_base = OTHER; note = 5'-methyluridine-3'-phosphate
aattgtaataatacattttc

SEQ ID NO: 176 - RNA, 20 nt, synthetic construct
  source 1..20: mol_type = other RNA
  modified_base 10: mod_base = OTHER; note = 5'-methyluridine-3'-phosphate
  modified_base 14: mod_base = OTHER; note = 5'-methyluridine-3'-phosphate
  modified_base 15: mod_base = OTHER; note = 5'-methyluridine-3'-phosphate
acactggactaaattgtaat

SEQ ID NO: 177 - RNA, 20 nt, synthetic construct
  source 1..20: mol_type = other RNA
  modified_base 6: mod_base = OTHER; note = 5'-methyluridine-3'-phosphate
  modified_base 8: mod_base = OTHER; note = 5'-methyluridine-3'-phosphate
  modified_base 14: mod_base = OTHER; note = 5'-methyluridine-3'-phosphate
tatgctatgacactggacta

SEQ ID NO: 178 - RNA, 20 nt, synthetic construct
  source 1..20: mol_type = other RNA
  modified_base 6: mod_base = OTHER; note = 5'-methyluridine-3'-phosphate
  modified_base 9: mod_base = OTHER; note = 5'-methyluridine-3'-phosphate
  modified_base 12: mod_base = OTHER; note = 5'-methyluridine-3'-phosphate
  modified_base 13: mod_base = OTHER; note = 5'-methyluridine-3'-phosphate
  modified_base 15: mod_base = OTHER; note = 5'-methyluridine-3'-phosphate
tcgcatcatccttatgctat

SEQ ID NO: 179 - RNA, 20 nt, synthetic construct
  source 1..20: mol_type = other RNA
  modified_base 6: mod_base = OTHER; note = 5'-methyluridine-3'-phosphate
  modified_base 11: mod_base = OTHER; note = 5'-methyluridine-3'-phosphate
ggttttcccctcgcatcatc

SEQ ID NO: 180 - RNA, 20 nt, synthetic construct
  source 1..20: mol_type = other RNA
  modified_base 6: mod_base = OTHER; note = 5'-methyluridine-3'-phosphate
  modified_base 9: mod_base = OTHER; note = 5'-methyluridine-3'-phosphate
  modified_base 14: mod_base = OTHER; note = 5'-methyluridine-3'-phosphate
  modified_base 15: mod_base = OTHER; note = 5'-methyluridine-3'-phosphate
aacactgctcgggttttccc

SEQ ID NO: 181 - RNA, 20 nt, synthetic construct
  source 1..20: mol_type = other RNA
  modified_base 6: mod_base = OTHER; note = 5'-methyluridine-3'-phosphate
  modified_base 8: mod_base = OTHER; note = 5'-methyluridine-3'-phosphate
  modified_base 9: mod_base = OTHER; note = 5'-methyluridine-3'-phosphate
cctcctcttggcaacactgc

SEQ ID NO: 182 - RNA, 20 nt, synthetic construct
  source 1..20: mol_type = other RNA
  modified_base 6: mod_base = OTHER; note = 5'-methyluridine-3'-phosphate
  modified_base 8: mod_base = OTHER; note = 5'-methyluridine-3'-phosphate
  modified_base 9: mod_base = OTHER; note = 5'-methyluridine-3'-phosphate
  modified_base 10: mod_base = OTHER; note = 5'-methyluridine-3'-phosphate
  modified_base 13: mod_base = OTHER; note = 5'-methyluridine-3'-phosphate
tggcctatttcctcctcttg

SEQ ID NO: 183 - RNA, 20 nt, synthetic construct
  source 1..20: mol_type = other RNA
  modified_base 12: mod_base = OTHER; note = 5'-methyluridine-3'-phosphate
  modified_base 13: mod_base = OTHER; note = 5'-methyluridine-3'-phosphate
cccagaccacattggcctat

SEQ ID NO: 184 - RNA, 20 nt, synthetic construct
  source 1..20: mol_type = other RNA
  modified_base 12: mod_base = OTHER; note = 5'-methyluridine-3'-phosphate
atatccaaccgtcccagacc

SEQ ID NO: 185 - RNA, 20 nt, synthetic construct
  source 1..20: mol_type = other RNA
  modified_base 6: mod_base = OTHER; note = 5'-methyluridine-3'-phosphate
  modified_base 7: mod_base = OTHER; note = 5'-methyluridine-3'-phosphate
  modified_base 11: mod_base = OTHER; note = 5'-methyluridine-3'-phosphate
  modified_base 13: mod_base = OTHER; note = 5'-methyluridine-3'-phosphate
  modified_base 15: mod_base = OTHER; note = 5'-methyluridine-3'-phosphate
gatgtttaagtatatccaac

SEQ ID NO: 186 - RNA, 20 nt, synthetic construct
  source 1..20: mol_type = other RNA
  modified_base 7: mod_base = OTHER; note = 5'-methyluridine-3'-phosphate
  modified_base 8: mod_base = OTHER; note = 5'-methyluridine-3'-phosphate
  modified_base 13: mod_base = OTHER; note = 5'-methyluridine-3'-phosphate
  modified_base 15: mod_base = OTHER; note = 5'-methyluridine-3'-phosphate
tgattattaagatgtttaag

SEQ ID NO: 187 - RNA, 20 nt, synthetic construct
  source 1..20: mol_type = other RNA
  modified_base 6: mod_base = OTHER; note = 5'-methyluridine-3'-phosphate
  modified_base 9: mod_base = OTHER; note = 5'-methyluridine-3'-phosphate
  modified_base 11: mod_base = OTHER; note = 5'-methyluridine-3'-phosphate
  modified_base 14: mod_base = OTHER; note = 5'-methyluridine-3'-phosphate
  modified_base 15: mod_base = OTHER; note = 5'-methyluridine-3'-phosphate
aaaattactctgattattaa

SEQ ID NO: 188 - RNA, 20 nt, synthetic construct
  source 1..20: mol_type = other RNA
  modified_base 6: mod_base = OTHER; note = 5'-methyluridine-3'-phosphate
  modified_base 10: mod_base = OTHER; note = 5'-methyluridine-3'-phosphate
ctttgtaaatgaaaattact

SEQ ID NO: 189 - RNA, 20 nt, synthetic construct
  source 1..20: mol_type = other RNA
  modified_base 11: mod_base = OTHER; note = 5'-methyluridine-3'-phosphate
  modified_base 13: mod_base = OTHER; note = 5'-methyluridine-3'-phosphate
  modified_base 15: mod_base = OTHER; note = 5'-methyluridine-3'-phosphate
agtaccgacctctctttgta

SEQ ID NO: 190 - RNA, 20 nt, synthetic construct
  source 1..20: mol_type = other RNA
  modified_base 7: mod_base = OTHER; note = 5'-methyluridine-3'-phosphate
  modified_base 8: mod_base = OTHER; note = 5'-methyluridine-3'-phosphate
  modified_base 9: mod_base = OTHER; note = 5'-methyluridine-3'-phosphate
  modified_base 10: mod_base = OTHER; note = 5'-methyluridine-3'-phosphate
  modified_base 14: mod_base = OTHER; note = 5'-methyluridine-3'-phosphate
gggttattttaagtaccgac

SEQ ID NO: 191 - RNA, 20 nt, synthetic construct
  source 1..20: mol_type = other RNA
  modified_base 6: mod_base = OTHER; note = 5'-methyluridine-3'-phosphate
  modified_base 7: mod_base = OTHER; note = 5'-methyluridine-3'-phosphate
  modified_base 13: mod_base = OTHER; note = 5'-methyluridine-3'-phosphate
  modified_base 14: mod_base = OTHER; note = 5'-methyluridine-3'-phosphate
tatttttcagggttatttta

SEQ ID NO: 192 - RNA, 20 nt, synthetic construct
  source 1..20: mol_type = other RNA
  modified_base 10: mod_base = OTHER; note = 5'-methyluridine-3'-phosphate
  modified_base 12: mod_base = OTHER; note = 5'-methyluridine-3'-phosphate
  modified_base 13: mod_base = OTHER; note = 5'-methyluridine-3'-phosphate
  modified_base 15: mod_base = OTHER; note = 5'-methyluridine-3'-phosphate
gaattccagtgttatttttc

SEQ ID NO: 193 - RNA, 20 nt, synthetic construct
  source 1..20: mol_type = other RNA
  modified_base 15: mod_base = OTHER; note = 5'-methyluridine-3'-phosphate
tgctagaaaaggaattccag

SEQ ID NO: 194 - RNA, 20 nt, synthetic construct
  source 1..20: mol_type = other RNA
  modified_base 6: mod_base = OTHER; note = 5'-methyluridine-3'-phosphate
  modified_base 8: mod_base = OTHER; note = 5'-methyluridine-3'-phosphate
  modified_base 11: mod_base = OTHER; note = 5'-methyluridine-3'-phosphate
  modified_base 14: mod_base = OTHER; note = 5'-methyluridine-3'-phosphate
ataaatataatgctagaaaa

SEQ ID NO: 195 - RNA, 20 nt, synthetic construct
  source 1..20: mol_type = other RNA
  modified_base 7: mod_base = OTHER; note = 5'-methyluridine-3'-phosphate
  modified_base 14: mod_base = OTHER; note = 5'-methyluridine-3'-phosphate
ggcaaatcaggaataaatat

SEQ ID NO: 196 - RNA, 20 nt, synthetic construct
  source 1..20: mol_type = other RNA
atatggcaaaggcaaatcag

SEQ ID NO: 197 - RNA, 20 nt, synthetic construct
  source 1..20: mol_type = other RNA
  modified_base 6: mod_base = OTHER; note = 5'-methyluridine-3'-phosphate
  modified_base 10: mod_base = OTHER; note = 5'-methyluridine-3'-phosphate
  modified_base 11: mod_base = OTHER; note = 5'-methyluridine-3'-phosphate
  modified_base 13: mod_base = OTHER; note = 5'-methyluridine-3'-phosphate
  modified_base 15: mod_base = OTHER; note = 5'-methyluridine-3'-phosphate
agcattagattatatggcaa

SEQ ID NO: 198 - RNA, 20 nt, synthetic construct
  source 1..20: mol_type = other RNA
  modified_base 7: mod_base = OTHER; note = 5'-methyluridine-3'-phosphate
actatataaacaagcattag

SEQ ID NO: 199 - RNA, 20 nt, synthetic construct
  source 1..20: mol_type = other RNA
  modified_base 13: mod_base = OTHER; note = 5'-methyluridine-3'-phosphate
  modified_base 15: mod_base = OTHER; note = 5'-methyluridine-3'-phosphate
aataccagacactatataaa

SEQ ID NO: 200 - RNA, 20 nt, synthetic construct
  source 1..20: mol_type = other RNA
  modified_base 6: mod_base = OTHER; note = 5'-methyluridine-3'-phosphate
  modified_base 8: mod_base = OTHER; note = 5'-methyluridine-3'-phosphate
  modified_base 9: mod_base = OTHER; note = 5'-methyluridine-3'-phosphate
agaactgttaaacaatacca

SEQ ID NO: 201 - RNA, 20 nt, synthetic construct
  source 1..20: mol_type = other RNA
  modified_base 15: mod_base = OTHER; note = 5'-methyluridine-3'-phosphate
agaaaagacagaactgttaa

SEQ ID NO: 202 - RNA, 20 nt, synthetic construct
  source 1..20: mol_type = other RNA
  modified_base 7: mod_base = OTHER; note = 5'-methyluridine-3'-phosphate
  modified_base 8: mod_base = OTHER; note = 5'-methyluridine-3'-phosphate
  modified_base 9: mod_base = OTHER; note = 5'-methyluridine-3'-phosphate
  modified_base 13: mod_base = OTHER; note = 5'-methyluridine-3'-phosphate
gtggcatttaaatagaaaag

SEQ ID NO: 203 - RNA, 20 nt, synthetic construct
  source 1..20: mol_type = other RNA
  modified_base 6: mod_base = OTHER; note = 5'-methyluridine-3'-phosphate
  modified_base 7: mod_base = OTHER; note = 5'-methyluridine-3'-phosphate
  modified_base 8: mod_base = OTHER; note = 5'-methyluridine-3'-phosphate
  modified_base 11: mod_base = OTHER; note = 5'-methyluridine-3'-phosphate
taaaatttagtggcatttaa

SEQ ID NO: 204 - RNA, 20 nt, synthetic construct
  source 1..20: mol_type = other RNA
  modified_base 6: mod_base = OTHER; note = 5'-methyluridine-3'-phosphate
  modified_base 10: mod_base = OTHER; note = 5'-methyluridine-3'-phosphate
  modified_base 11: mod_base = OTHER; note = 5'-methyluridine-3'-phosphate
  modified_base 12: mod_base = OTHER; note = 5'-methyluridine-3'-phosphate
aggtatgaatttaaaattta

SEQ ID NO: 205 - RNA, 20 nt, synthetic construct
  source 1..20: mol_type = other RNA
  modified_base 8: mod_base = OTHER; note = 5'-methyluridine-3'-phosphate
tgaatcatggaaaggtatga

SEQ ID NO: 206 - RNA, 20 nt, synthetic construct
  source 1..20: mol_type = other RNA
  modified_base 8: mod_base = OTHER; note = 5'-methyluridine-3'-phosphate
  modified_base 9: mod_base = OTHER; note = 5'-methyluridine-3'-phosphate
  modified_base 10: mod_base = OTHER; note = 5'-methyluridine-3'-phosphate
  modified_base 11: mod_base = OTHER; note = 5'-methyluridine-3'-phosphate
  modified_base 15: mod_base = OTHER; note = 5'-methyluridine-3'-phosphate
ttttgaattttgaatcatgg

SEQ ID NO: 207 - RNA, 20 nt, synthetic construct
  source 1..20: mol_type = other RNA
  modified_base 6: mod_base = OTHER; note = 5'-methyluridine-3'-phosphate
  modified_base 11: mod_base = OTHER; note = 5'-methyluridine-3'-phosphate
  modified_base 13: mod_base = OTHER; note = 5'-methyluridine-3'-phosphate
  modified_base 14: mod_base = OTHER; note = 5'-methyluridine-3'-phosphate
  modified_base 15: mod_base = OTHER; note = 5'-methyluridine-3'-phosphate
tcccatgggatcttttgaat

SEQ ID NO: 208 - RNA, 20 nt, synthetic construct
  source 1..20: mol_type = other RNA
  modified_base 10: mod_base = OTHER; note = 5'-methyluridine-3'-phosphate
  modified_base 12: mod_base = OTHER; note = 5'-methyluridine-3'-phosphate
ttccaaccatctcccatggg

SEQ ID NO: 209 - RNA, 20 nt, synthetic construct
  source 1..20: mol_type = other RNA
  modified_base 9: mod_base = OTHER; note = 5'-methyluridine-3'-phosphate
  modified_base 10: mod_base = OTHER; note = 5'-methyluridine-3'-phosphate
  modified_base 11: mod_base = OTHER; note = 5'-methyluridine-3'-phosphate
  modified_base 12: mod_base = OTHER; note = 5'-methyluridine-3'-phosphate
agtggagattttccaaccat

SEQ ID NO: 210 - RNA, 20 nt, synthetic construct
  source 1..20: mol_type = other RNA
  modified_base 9: mod_base = OTHER; note = 5'-methyluridine-3'-phosphate
  modified_base 14: mod_base = OTHER; note = 5'-methyluridine-3'-phosphate
ttggaggatgaagtggagat

SEQ ID NO: 211 - RNA, 20 nt, synthetic construct
  source 1..20: mol_type = other RNA
  modified_base 8: mod_base = OTHER; note = 5'-methyluridine-3'-phosphate
  modified_base 12: mod_base = OTHER; note = 5'-methyluridine-3'-phosphate
  modified_base 13: mod_base = OTHER; note = 5'-methyluridine-3'-phosphate
acttgaatggcttggaggat

SEQ ID NO: 212 - RNA, 20 nt, synthetic construct
  source 1..20: mol_type = other RNA
  modified_base 15: mod_base = OTHER; note = 5'-methyluridine-3'-phosphate
tctggaaaggaaacttgaat

SEQ ID NO: 213 - RNA, 20 nt, synthetic construct
  source 1..20: mol_type = other RNA
  modified_base 8: mod_base = OTHER; note = 5'-methyluridine-3'-phosphate
  modified_base 9: mod_base = OTHER; note = 5'-methyluridine-3'-phosphate
  modified_base 12: mod_base = OTHER; note = 5'-methyluridine-3'-phosphate
  modified_base 13: mod_base = OTHER; note = 5'-methyluridine-3'-phosphate
  modified_base 15: mod_base = OTHER; note = 5'-methyluridine-3'-phosphate
gtagcagttgcttctggaaa

SEQ ID NO: 214 - RNA, 20 nt, synthetic construct
  source 1..20: mol_type = other RNA
  modified_base 12: mod_base = OTHER; note = 5'-methyluridine-3'-phosphate
atgaaaggcagtagcagttg

SEQ ID NO: 215 - RNA, 20 nt, synthetic construct
  source 1..20: mol_type = other RNA
  modified_base 8: mod_base = OTHER; note = 5'-methyluridine-3'-phosphate
  modified_base 10: mod_base = OTHER; note = 5'-methyluridine-3'-phosphate
  modified_base 14: mod_base = OTHER; note = 5'-methyluridine-3'-phosphate
aagaacatatgaatgaaagg

SEQ ID NO: 216 - RNA, 20 nt, synthetic construct
  source 1..20: mol_type = other RNA
  modified_base 6: mod_base = OTHER; note = 5'-methyluridine-3'-phosphate
  modified_base 7: mod_base = OTHER; note = 5'-methyluridine-3'-phosphate
  modified_base 8: mod_base = OTHER; note = 5'-methyluridine-3'-phosphate
ctatctttagaagaacatat

SEQ ID NO: 217 - RNA, 20 nt, synthetic construct
  source 1..20: mol_type = other RNA
  modified_base 6: mod_base = OTHER; note = 5'-methyluridine-3'-phosphate
  modified_base 8: mod_base = OTHER; note = 5'-methyluridine-3'-phosphate
  modified_base 13: mod_base = OTHER; note = 5'-methyluridine-3'-phosphate
  modified_base 15: mod_base = OTHER; note = 5'-methyluridine-3'-phosphate
ccaaatgtagactatcttta

SEQ ID NO: 218 - RNA, 20 nt, synthetic construct
  source 1..20: mol_type = other RNA
  modified_base 8: mod_base = OTHER; note = 5'-methyluridine-3'-phosphate
  modified_base 9: mod_base = OTHER; note = 5'-methyluridine-3'-phosphate
  modified_base 10: mod_base = OTHER; note = 5'-methyluridine-3'-phosphate
acatacatttccaaatgtag

SEQ ID NO: 219 - RNA, 20 nt, synthetic construct
  source 1..20: mol_type = other RNA
  modified_base 7: mod_base = OTHER; note = 5'-methyluridine-3'-phosphate
  modified_base 8: mod_base = OTHER; note = 5'-methyluridine-3'-phosphate
  modified_base 9: mod_base = OTHER; note = 5'-methyluridine-3'-phosphate
  modified_base 10: mod_base = OTHER; note = 5'-methyluridine-3'-phosphate
  modified_base 15: mod_base = OTHER; note = 5'-methyluridine-3'-phosphate
acgtgcttttaacatacatt

SEQ ID NO: 220 - RNA, 20 nt, synthetic construct
  source 1..20: mol_type = other RNA
  modified_base 11: mod_base = OTHER; note = 5'-methyluridine-3'-phosphate
  modified_base 15: mod_base = OTHER; note = 5'-methyluridine-3'-phosphate
attttaaaaatacgtgcttt

SEQ ID NO: 221 - RNA, 20 nt, synthetic construct
  source 1..20: mol_type = other RNA
  modified_base 13: mod_base = OTHER; note = 5'-methyluridine-3'-phosphate
  modified_base 14: mod_base = OTHER; note = 5'-methyluridine-3'-phosphate
  modified_base 15: mod_base = OTHER; note = 5'-methyluridine-3'-phosphate
ttaggaaaaaaattttaaaa

SEQ ID NO: 222 - RNA, 20 nt, synthetic construct
  source 1..20: mol_type = other RNA
  modified_base 6: mod_base = OTHER; note = 5'-methyluridine-3'-phosphate
  modified_base 7: mod_base = OTHER; note = 5'-methyluridine-3'-phosphate
  modified_base 10: mod_base = OTHER; note = 5'-methyluridine-3'-phosphate
  modified_base 12: mod_base = OTHER; note = 5'-methyluridine-3'-phosphate
  modified_base 13: mod_base = OTHER; note = 5'-methyluridine-3'-phosphate
  modified_base 14: mod_base = OTHER; note = 5'-methyluridine-3'-phosphate
atgtgttactatttaggaaa

SEQ ID NO: 223 - RNA, 20 nt, synthetic construct
  source 1..20: mol_type = other RNA
  modified_base 8: mod_base = OTHER; note = 5'-methyluridine-3'-phosphate
  modified_base 13: mod_base = OTHER; note = 5'-methyluridine-3'-phosphate
  modified_base 15: mod_base = OTHER; note = 5'-methyluridine-3'-phosphate
gcagacatacaatgtgttac

SEQ ID NO: 224 - RNA, 20 nt, synthetic construct
  source 1..20: mol_type = other RNA
aaagtacacagcagacatac

SEQ ID NO: 225 - RNA, 20 nt, synthetic construct
  source 1..20: mol_type = other RNA
  modified_base 10: mod_base = OTHER; note = 5'-methyluridine-3'-phosphate
aaataaaaatagcaaagtac

SEQ ID NO: 226 - RNA, 20 nt, synthetic construct
  source 1..20: mol_type = other RNA
  modified_base 10: mod_base = OTHER; note = 5'-methyluridine-3'-phosphate
  modified_base 14: mod_base = OTHER; note = 5'-methyluridine-3'-phosphate
acactaaaataaataaaaat

SEQ ID NO: 227 - RNA, 20 nt, synthetic construct
  source 1..20: mol_type = other RNA
  modified_base 6: mod_base = OTHER; note = 5'-methyluridine-3'-phosphate
ctatataagaaacactaaaa

SEQ ID NO: 228 - RNA, 20 nt, synthetic construct
  source 1..20: mol_type = other RNA
  modified_base 8: mod_base = OTHER; note = 5'-methyluridine-3'-phosphate
  modified_base 10: mod_base = OTHER; note = 5'-methyluridine-3'-phosphate
  modified_base 13: mod_base = OTHER; note = 5'-methyluridine-3'-phosphate
  modified_base 15: mod_base = OTHER; note = 5'-methyluridine-3'-phosphate
cattccatctgctatataag

SEQ ID NO: 229 - RNA, 20 nt, synthetic construct
  source 1..20: mol_type = other RNA
  modified_base 9: mod_base = OTHER; note = 5'-methyluridine-3'-phosphate
  modified_base 10: mod_base = OTHER; note = 5'-methyluridine-3'-phosphate
  modified_base 13: mod_base = OTHER; note = 5'-methyluridine-3'-phosphate
  modified_base 14: mod_base = OTHER; note = 5'-methyluridine-3'-phosphate
acttcaaattcattccatct

SEQ ID NO: 230 - RNA, 20 nt, synthetic construct
  source 1..20: mol_type = other RNA
  modified_base 7: mod_base = OTHER; note = 5'-methyluridine-3'-phosphate
  modified_base 14: mod_base = OTHER; note = 5'-methyluridine-3'-phosphate
  modified_base 15: mod_base = OTHER; note = 5'-methyluridine-3'-phosphate
cagccctgggaacttcaaat

SEQ ID NO: 231 - RNA, 20 nt, synthetic construct
  source 1..20: mol_type = other RNA
  modified_base 8: mod_base = OTHER; note = 5'-methyluridine-3'-phosphate
  modified_base 11: mod_base = OTHER; note = 5'-methyluridine-3'-phosphate
gcatggatcctcagccctgg

SEQ ID NO: 232 - RNA, 20 nt, synthetic construct
  source 1..20: mol_type = other RNA
  modified_base 15: mod_base = OTHER; note = 5'-methyluridine-3'-phosphate
aaacaaagaaggcatggatc

SEQ ID NO: 233 - RNA, 20 nt, synthetic construct
  source 1..20: mol_type = other RNA
  modified_base 9: mod_base = OTHER; note = 5'-methyluridine-3'-phosphate
  modified_base 10: mod_base = OTHER; note = 5'-methyluridine-3'-phosphate
aagataacttagaaacaaag

SEQ ID NO: 234 - RNA, 20 nt, synthetic construct
  source 1..20: mol_type = other RNA
  modified_base 6: mod_base = OTHER; note = 5'-methyluridine-3'-phosphate
  modified_base 8: mod_base = OTHER; note = 5'-methyluridine-3'-phosphate
aaagctatgggaaagataac

SEQ ID NO: 235 - RNA, 20 nt, synthetic construct
  source 1..20: mol_type = other RNA
  modified_base 6: mod_base = OTHER; note = 5'-methyluridine-3'-phosphate
  modified_base 9: mod_base = OTHER; note = 5'-methyluridine-3'-phosphate
aaagataatgaaaagctatg

SEQ ID NO: 236 - RNA, 20 nt, synthetic construct
  source 1..20: mol_type = other RNA
  modified_base 8: mod_base = OTHER; note = 5'-methyluridine-3'-phosphate
  modified_base 10: mod_base = OTHER; note = 5'-methyluridine-3'-phosphate
tggatcatatgaaagataat

SEQ ID NO: 237 - RNA, 20 nt, synthetic construct
  source 1..20: mol_type = other RNA
  modified_base 6: mod_base = OTHER; note = 5'-methyluridine-3'-phosphate
  modified_base 8: mod_base = OTHER; note = 5'-methyluridine-3'-phosphate
  modified_base 11: mod_base = OTHER; note = 5'-methyluridine-3'-phosphate
  modified_base 15: mod_base = OTHER; note = 5'-methyluridine-3'-phosphate
taacatatactggatcatat

SEQ ID NO: 238 - RNA, 20 nt, synthetic construct
  source 1..20: mol_type = other RNA
  modified_base 7: mod_base = OTHER; note = 5'-methyluridine-3'-phosphate
  modified_base 9: mod_base = OTHER; note = 5'-methyluridine-3'-phosphate
  modified_base 10: mod_base = OTHER; note = 5'-methyluridine-3'-phosphate
  modified_base 11: mod_base = OTHER; note = 5'-methyluridine-3'-phosphate
aggacatatttaacatatac

SEQ ID NO: 239 - RNA, 20 nt, synthetic construct
  source 1..20: mol_type = other RNA
  modified_base 7: mod_base = OTHER; note = 5'-methyluridine-3'-phosphate
  modified_base 9: mod_base = OTHER; note = 5'-methyluridine-3'-phosphate
  modified_base 11: mod_base = OTHER; note = 5'-methyluridine-3'-phosphate
aatgtatatgtaggacatat

SEQ ID NO: 240 - RNA, 20 nt, synthetic construct
  source 1..20: mol_type = other RNA
  modified_base 6: mod_base = OTHER; note = 5'-methyluridine-3'-phosphate
  modified_base 8: mod_base = OTHER; note = 5'-methyluridine-3'-phosphate
  modified_base 10: mod_base = OTHER; note = 5'-methyluridine-3'-phosphate
  modified_base 14: mod_base = OTHER; note = 5'-methyluridine-3'-phosphate
gtggttgtctaaatgtatat

SEQ ID NO: 241 - RNA, 20 nt, synthetic construct
  source 1..20: mol_type = other RNA
  modified_base 10: mod_base = OTHER; note = 5'-methyluridine-3'-phosphate
  modified_base 13: mod_base = OTHER; note = 5'-methyluridine-3'-phosphate
cttaacaaatggtggttgtc

SEQ ID NO: 242 - RNA, 20 nt, synthetic construct
  source 1..20: mol_type = other RNA
  modified_base 10: mod_base = OTHER; note = 5'-methyluridine-3'-phosphate
  modified_base 13: mod_base = OTHER; note = 5'-methyluridine-3'-phosphate
  modified_base 14: mod_base = OTHER; note = 5'-methyluridine-3'-phosphate
tagagcaaatacttaacaaa

SEQ ID NO: 243 - RNA, 20 nt, synthetic construct
  source 1..20: mol_type = other RNA
  modified_base 7: mod_base = OTHER; note = 5'-methyluridine-3'-phosphate
  modified_base 9: mod_base = OTHER; note = 5'-methyluridine-3'-phosphate
  modified_base 12: mod_base = OTHER; note = 5'-methyluridine-3'-phosphate
aaactctgtcctagagcaaa

SEQ ID NO: 244 - RNA, 20 nt, synthetic construct
  source 1..20: mol_type = other RNA
  modified_base 10: mod_base = OTHER; note = 5'-methyluridine-3'-phosphate
ataaacaaatccaaactctg

SEQ ID NO: 245 - RNA, 20 nt, synthetic construct
  source 1..20: mol_type = other RNA
  modified_base 13: mod_base = OTHER; note = 5'-methyluridine-3'-phosphate
tttgagcaaacataaacaaa

SEQ ID NO: 246 - RNA, 20 nt, synthetic construct
  source 1..20: mol_type = other RNA
  modified_base 7: mod_base = OTHER; note = 5'-methyluridine-3'-phosphate
  modified_base 10: mod_base = OTHER; note = 5'-methyluridine-3'-phosphate
  modified_base 11: mod_base = OTHER; note = 5'-methyluridine-3'-phosphate
  modified_base 12: mod_base = OTHER; note = 5'-methyluridine-3'-phosphate
  modified_base 13: mod_base = OTHER; note = 5'-methyluridine-3'-phosphate
tgggtctccttttgagcaaa

SEQ ID NO: 247 - RNA, 20 nt, synthetic construct
  source 1..20: mol_type = other RNA
  modified_base 13: mod_base = OTHER; note = 5'-methyluridine-3'-phosphate
ctggagagcccatgggtctc

SEQ ID NO: 248 - RNA, 20 nt, synthetic construct
  source 1..20: mol_type = other RNA
  modified_base 7: mod_base = OTHER; note = 5'-methyluridine-3'-phosphate
  modified_base 14: mod_base = OTHER; note = 5'-methyluridine-3'-phosphate
actcagtgcaccctggagag

SEQ ID NO: 249 - RNA, 20 nt, synthetic construct
  source 1..20: mol_type = other RNA
  modified_base 9: mod_base = OTHER; note = 5'-methyluridine-3'-phosphate
  modified_base 10: mod_base = OTHER; note = 5'-methyluridine-3'-phosphate
  modified_base 14: mod_base = OTHER; note = 5'-methyluridine-3'-phosphate
ggactagattgactcagtgc

SEQ ID NO: 250 - RNA, 20 nt, synthetic construct
  source 1..20: mol_type = other RNA
  modified_base 6: mod_base = OTHER; note = 5'-methyluridine-3'-phosphate
  modified_base 7: mod_base = OTHER; note = 5'-methyluridine-3'-phosphate
  modified_base 8: mod_base = OTHER; note = 5'-methyluridine-3'-phosphate
  modified_base 9: mod_base = OTHER; note = 5'-methyluridine-3'-phosphate
  modified_base 10: mod_base = OTHER; note = 5'-methyluridine-3'-phosphate
attgctttttaggactagat

SEQ ID NO: 251 - RNA, 20 nt, synthetic construct
  source 1..20: mol_type = other RNA
  modified_base 6: mod_base = OTHER; note = 5'-methyluridine-3'-phosphate
  modified_base 11: mod_base = OTHER; note = 5'-methyluridine-3'-phosphate
  modified_base 12: mod_base = OTHER; note = 5'-methyluridine-3'-phosphate
  modified_base 15: mod_base = OTHER; note = 5'-methyluridine-3'-phosphate
aataataagattgcttttta

SEQ ID NO: 252 - RNA, 20 nt, synthetic construct
  source 1..20: mol_type = other RNA
  modified_base 10: mod_base = OTHER; note = 5'-methyluridine-3'-phosphate
  modified_base 11: mod_base = OTHER; note = 5'-methyluridine-3'-phosphate
  modified_base 14: mod_base = OTHER; note = 5'-methyluridine-3'-phosphate
catacagagttaataataag

SEQ ID NO: 253 - RNA, 20 nt, synthetic construct
  source 1..20: mol_type = other RNA
  modified_base 7: mod_base = OTHER; note = 5'-methyluridine-3'-phosphate
  modified_base 8: mod_base = OTHER; note = 5'-methyluridine-3'-phosphate
  modified_base 10: mod_base = OTHER; note = 5'-methyluridine-3'-phosphate
  modified_base 12: mod_base = OTHER; note = 5'-methyluridine-3'-phosphate
  modified_base 15: mod_base = OTHER; note = 5'-methyluridine-3'-phosphate
acatgattctgtcatacaga

SEQ ID NO: 254 - RNA, 20 nt, synthetic construct
  source 1..20: mol_type = other RNA
  modified_base 6: mod_base = OTHER; note = 5'-methyluridine-3'-phosphate
  modified_base 7: mod_base = OTHER; note = 5'-methyluridine-3'-phosphate
  modified_base 15: mod_base = OTHER; note = 5'-methyluridine-3'-phosphate
aaaagttccagacatgattc

SEQ ID NO: 255 - RNA, 20 nt, synthetic construct
  source 1..20: mol_type = other RNA
aagcagaaaacaaaagttcc

SEQ ID NO: 256 - RNA, 20 nt, synthetic construct
  source 1..20: mol_type = other RNA
  modified_base 6: mod_base = OTHER; note = 5'-methyluridine-3'-phosphate
atacttgacagaaagcagaa

SEQ ID NO: 257 - RNA, 20 nt, synthetic construct
  source 1..20: mol_type = other RNA
  modified_base 9: mod_base = OTHER; note = 5'-methyluridine-3'-phosphate
  modified_base 10: mod_base = OTHER; note = 5'-methyluridine-3'-phosphate
  modified_base 11: mod_base = OTHER; note = 5'-methyluridine-3'-phosphate
  modified_base 13: mod_base = OTHER; note = 5'-methyluridine-3'-phosphate
aagtgaagtttatacttgac

SEQ ID NO: 258 - RNA, 20 nt, synthetic construct
  source 1..20: mol_type = other RNA
  modified_base 7: mod_base = OTHER; note = 5'-methyluridine-3'-phosphate
  modified_base 13: mod_base = OTHER; note = 5'-methyluridine-3'-phosphate
acagcatcaaagtgaagttt

SEQ ID NO: 259 - RNA, 20 nt, synthetic construct
  source 1..20: mol_type = other RNA
  modified_base 6: mod_base = OTHER; note = 5'-methyluridine-3'-phosphate
  modified_base 7: mod_base = OTHER; note = 5'-methyluridine-3'-phosphate
  modified_base 13: mod_base = OTHER; note = 5'-methyluridine-3'-phosphate
tgattttgcaagtacagcat

SEQ ID NO: 260 - RNA, 20 nt, synthetic construct
  source 1..20: mol_type = other RNA
  modified_base 8: mod_base = OTHER; note = 5'-methyluridine-3'-phosphate
  modified_base 10: mod_base = OTHER; note = 5'-methyluridine-3'-phosphate
  modified_base 13: mod_base = OTHER; note = 5'-methyluridine-3'-phosphate
  modified_base 14: mod_base = OTHER; note = 5'-methyluridine-3'-phosphate
  modified_base 15: mod_base = OTHER; note = 5'-methyluridine-3'-phosphate
aagaaaatgtgattttgcaa

SEQ ID NO: 261 - RNA, 20 nt, synthetic construct
  source 1..20: mol_type = other RNA
  modified_base 6: mod_base = OTHER; note = 5'-methyluridine-3'-phosphate
  modified_base 7: mod_base = OTHER; note = 5'-methyluridine-3'-phosphate
  modified_base 8: mod_base = OTHER; note = 5'-methyluridine-3'-phosphate
cggaatttccagaaagaaaa

SEQ ID NO: 262 - RNA, 20 nt, synthetic construct
  source 1..20: mol_type = other RNA
  modified_base 9: mod_base = OTHER; note = 5'-methyluridine-3'-phosphate
aggtacactgccggaatttc

SEQ ID NO: 263 - RNA, 20 nt, synthetic construct
  source 1..20: mol_type = other RNA
  modified_base 7: mod_base = OTHER; note = 5'-methyluridine-3'-phosphate
  modified_base 13: mod_base = OTHER; note = 5'-methyluridine-3'-phosphate
tagcagtcaaggtacactgc

SEQ ID NO: 264 - RNA, 20 nt, synthetic construct
  source 1..20: mol_type = other RNA
  modified_base 9: mod_base = OTHER; note = 5'-methyluridine-3'-phosphate
  modified_base 13: mod_base = OTHER; note = 5'-methyluridine-3'-phosphate
gcacagggtagctagcagtc

SEQ ID NO: 265 - RNA, 20 nt, synthetic construct
  source 1..20: mol_type = other RNA
  modified_base 6: mod_base = OTHER; note = 5'-methyluridine-3'-phosphate
  modified_base 7: mod_base = OTHER; note = 5'-methyluridine-3'-phosphate
  modified_base 8: mod_base = OTHER; note = 5'-methyluridine-3'-phosphate
  modified_base 10: mod_base = OTHER; note = 5'-methyluridine-3'-phosphate
aggcttttctggcacagggt

SEQ ID NO: 266 - RNA, 20 nt, synthetic construct
  source 1..20: mol_type = other RNA
  modified_base 10: mod_base = OTHER; note = 5'-methyluridine-3'-phosphate
cacaacgaatgaggcttttc

SEQ ID NO: 267 - RNA, 20 nt, synthetic construct
  source 1..20: mol_type = other RNA
  modified_base 6: mod_base = OTHER; note = 5'-methyluridine-3'-phosphate
agggttcaagcacaacgaat

SEQ ID NO: 268 - RNA, 20 nt, synthetic construct
  source 1..20: mol_type = other RNA
  modified_base 8: mod_base = OTHER; note = 5'-methyluridine-3'-phosphate
  modified_base 9: mod_base = OTHER; note = 5'-methyluridine-3'-phosphate
ggtggcattcaagggttcaa

SEQ ID NO: 269 - RNA, 20 nt, synthetic construct
  source 1..20: mol_type = other RNA
  modified_base 6: mod_base = OTHER; note = 5'-methyluridine-3'-phosphate
  modified_base 13: mod_base = OTHER; note = 5'-methyluridine-3'-phosphate
agtgatgacagctggtggca

SEQ ID NO: 270 - RNA, 20 nt, synthetic construct
  source 1..20: mol_type = other RNA
  modified_base 6: mod_base = OTHER; note = 5'-methyluridine-3'-phosphate
  modified_base 8: mod_base = OTHER; note = 5'-methyluridine-3'-phosphate
  modified_base 10: mod_base = OTHER; note = 5'-methyluridine-3'-phosphate
  modified_base 13: mod_base = OTHER; note = 5'-methyluridine-3'-phosphate
agggctgtgtagtgatgaca

SEQ ID NO: 271 - RNA, 20 nt, synthetic construct
  source 1..20: mol_type = other RNA
  modified_base 7: mod_base = OTHER; note = 5'-methyluridine-3'-phosphate
  modified_base 8: mod_base = OTHER; note = 5'-methyluridine-3'-phosphate
agcctcttaggagggctgtg

SEQ ID NO: 272 - RNA, 20 nt, synthetic construct
  source 1..20: mol_type = other RNA
  modified_base 15: mod_base = OTHER; note = 5'-methyluridine-3'-phosphate
acctccaggaagcctcttag

SEQ ID NO: 273 - RNA, 20 nt, synthetic construct
  source 1..20: mol_type = other RNA
  modified_base 6: mod_base = OTHER; note = 5'-methyluridine-3'-phosphate
  modified_base 8: mod_base = OTHER; note = 5'-methyluridine-3'-phosphate
ctgaatctcgaaacctccag

SEQ ID NO: 274 - RNA, 20 nt, synthetic construct
  source 1..20: mol_type = other RNA
  modified_base 11: mod_base = OTHER; note = 5'-methyluridine-3'-phosphate
  modified_base 13: mod_base = OTHER; note = 5'-methyluridine-3'-phosphate
tcccagggcatctgaatctc

SEQ ID NO: 275 - RNA, 20 nt, synthetic construct
  source 1..20: mol_type = other RNA
  modified_base 9: mod_base = OTHER; note = 5'-methyluridine-3'-phosphate
  modified_base 11: mod_base = OTHER; note = 5'-methyluridine-3'-phosphate
ctctgggatctcccagggca

SEQ ID NO: 276 - RNA, 20 nt, synthetic construct
  source 1..20: mol_type = other RNA
  modified_base 13: mod_base = OTHER; note = 5'-methyluridine-3'-phosphate
  modified_base 15: mod_base = OTHER; note = 5'-methyluridine-3'-phosphate
gggaaaggaaactctgggat

SEQ ID NO: 277 - RNA, 20 nt, synthetic construct
  source 1..20: mol_type = other RNA
aatatggccaagagggaaag

SEQ ID NO: 278 - RNA, 20 nt, synthetic construct
  source 1..20: mol_type = other RNA
  modified_base 14: mod_base = OTHER; note = 5'-methyluridine-3'-phosphate
attgacaccagaatatggcc

SEQ ID NO: 279 - RNA, 20 nt, synthetic construct
  source 1..20: mol_type = other RNA
  modified_base 6: mod_base = OTHER; note = 5'-methyluridine-3'-phosphate
  modified_base 7: mod_base = OTHER; note = 5'-methyluridine-3'-phosphate
  modified_base 9: mod_base = OTHER; note = 5'-methyluridine-3'-phosphate
  modified_base 12: mod_base = OTHER; note = 5'-methyluridine-3'-phosphate
  modified_base 13: mod_base = OTHER; note = 5'-methyluridine-3'-phosphate
actccttgtcattgacacca

SEQ ID NO: 280 - RNA, 20 nt, synthetic construct
  source 1..20: mol_type = other RNA
  modified_base 10: mod_base = OTHER; note = 5'-methyluridine-3'-phosphate
  modified_base 13: mod_base = OTHER; note = 5'-methyluridine-3'-phosphate
aagccaaggtactccttgtc

SEQ ID NO: 281 - RNA, 20 nt, synthetic construct
  source 1..20: mol_type = other RNA
  modified_base 6: mod_base = OTHER; note = 5'-methyluridine-3'-phosphate
  modified_base 8: mod_base = OTHER; note = 5'-methyluridine-3'-phosphate
tgacatgtggcaaagccaag

SEQ ID NO: 282 - RNA, 20 nt, synthetic construct
  source 1..20: mol_type = other RNA
  modified_base 10: mod_base = OTHER; note = 5'-methyluridine-3'-phosphate
  modified_base 11: mod_base = OTHER; note = 5'-methyluridine-3'-phosphate
tcttcagccttgacatgtgg

SEQ ID NO: 283 - RNA, 20 nt, synthetic construct
  source 1..20: mol_type = other RNA
  modified_base 9: mod_base = OTHER; note = 5'-methyluridine-3'-phosphate
  modified_base 11: mod_base = OTHER; note = 5'-methyluridine-3'-phosphate
  modified_base 12: mod_base = OTHER; note = 5'-methyluridine-3'-phosphate
  modified_base 13: mod_base = OTHER; note = 5'-methyluridine-3'-phosphate
  modified_base 15: mod_base = OTHER; note = 5'-methyluridine-3'-phosphate
ggagacactgtttcttcagc

SEQ ID NO: 284 - RNA, 20 nt, synthetic construct
  source 1..20: mol_type = other RNA
  modified_base 7: mod_base = OTHER; note = 5'-methyluridine-3'-phosphate
  modified_base 9: mod_base = OTHER; note = 5'-methyluridine-3'-phosphate
  modified_base 11: mod_base = OTHER; note = 5'-methyluridine-3'-phosphate
  modified_base 12: mod_base = OTHER; note = 5'-methyluridine-3'-phosphate
aggagctctgttggagacac

SEQ ID NO: 285 - RNA, 20 nt, synthetic construct
  source 1..20: mol_type = other RNA
agataacacaaggagctctg

SEQ ID NO: 286 - RNA, 20 nt, synthetic construct
  source 1..20: mol_type = other RNA
  modified_base 6: mod_base = OTHER; note = 5'-methyluridine-3'-phosphate
acatgtacaaacagataaca

SEQ ID NO: 287 - RNA, 20 nt, synthetic construct
  source 1..20: mol_type = other RNA
  modified_base 7: mod_base = OTHER; note = 5'-methyluridine-3'-phosphate
  modified_base 13: mod_base = OTHER; note = 5'-methyluridine-3'-phosphate
  modified_base 15: mod_base = OTHER; note = 5'-methyluridine-3'-phosphate
tacaaatgcacatgtacaaa

SEQ ID NO: 288 - RNA, 20 nt, synthetic construct
  source 1..20: mol_type = other RNA
  modified_base 8: mod_base = OTHER; note = 5'-methyluridine-3'-phosphate
  modified_base 9: mod_base = OTHER; note = 5'-methyluridine-3'-phosphate
  modified_base 12: mod_base = OTHER; note = 5'-methyluridine-3'-phosphate
  modified_base 14: mod_base = OTHER; note = 5'-methyluridine-3'-phosphate
acaccaattactgtacaaat

SEQ ID NO: 289 - RNA, 20 nt, synthetic construct
  source 1..20: mol_type = other RNA
  modified_base 6: mod_base = OTHER; note = 5'-methyluridine-3'-phosphate
  modified_base 8: mod_base = OTHER; note = 5'-methyluridine-3'-phosphate
aacactgtcacaccaattac

SEQ ID NO: 290 - RNA, 20 nt, synthetic construct
  source 1..20: mol_type = other RNA
attcacacaaagaacactgt

SEQ ID NO: 291 - RNA, 20 nt, synthetic construct
  source 1..20: mol_type = other RNA
  modified_base 7: mod_base = OTHER; note = 5'-methyluridine-3'-phosphate
  modified_base 9: mod_base = OTHER; note = 5'-methyluridine-3'-phosphate
  modified_base 12: mod_base = OTHER; note = 5'-methyluridine-3'-phosphate
  modified_base 13: mod_base = OTHER; note = 5'-methyluridine-3'-phosphate
cttgcctgtaattcacacaa

SEQ ID NO: 292 - RNA, 20 nt, synthetic construct
  source 1..20: mol_type = other RNA
  modified_base 11: mod_base = OTHER; note = 5'-methyluridine-3'-phosphate
  modified_base 12: mod_base = OTHER; note = 5'-methyluridine-3'-phosphate
  modified_base 14: mod_base = OTHER; note = 5'-methyluridine-3'-phosphate
  modified_base 15: mod_base = OTHER; note = 5'-methyluridine-3'-phosphate
tcagccacaattcttgcctg

SEQ ID NO: 293 - RNA, 20 nt, synthetic construct
  source 1..20: mol_type = other RNA
  modified_base 9: mod_base = OTHER; note = 5'-methyluridine-3'-phosphate
  modified_base 10: mod_base = OTHER; note = 5'-methyluridine-3'-phosphate
  modified_base 13: mod_base = OTHER; note = 5'-methyluridine-3'-phosphate
tatgtgccttgctcagccac

SEQ ID NO: 294 - RNA, 20 nt, synthetic construct
  source 1..20: mol_type = other RNA
  modified_base 6: mod_base = OTHER; note = 5'-methyluridine-3'-phosphate
  modified_base 11: mod_base = OTHER; note = 5'-methyluridine-3'-phosphate
  modified_base 13: mod_base = OTHER; note = 5'-methyluridine-3'-phosphate
  modified_base 15: mod_base = OTHER; note = 5'-methyluridine-3'-phosphate
ctgagtagactatgtgcctt

SEQ ID NO: 295 - RNA, 20 nt, synthetic construct
  source 1..20: mol_type = other RNA
  modified_base 9: mod_base = OTHER; note = 5'-methyluridine-3'-phosphate
  modified_base 14: mod_base = OTHER; note = 5'-methyluridine-3'-phosphate
cttaggaatagactgagtag

SEQ ID NO: 296 - RNA, 20 nt, synthetic construct
  source 1..20: mol_type = other RNA
  modified_base 6: mod_base = OTHER; note = 5'-methyluridine-3'-phosphate
  modified_base 7: mod_base = OTHER; note = 5'-methyluridine-3'-phosphate
  modified_base 13: mod_base = OTHER; note = 5'-methyluridine-3'-phosphate
  modified_base 14: mod_base = OTHER; note = 5'-methyluridine-3'-phosphate
aggagttaggacttaggaat

SEQ ID NO: 297 - RNA, 20 nt, synthetic construct
  source 1..20: mol_type = other RNA
acaccacaaggaggagttag

SEQ ID NO: 298 - RNA, 20 nt, synthetic construct
  source 1..20: mol_type = other RNA
  modified_base 7: mod_base = OTHER; note = 5'-methyluridine-3'-phosphate
tacaaatccaacaccacaag

SEQ ID NO: 299 - RNA, 20 nt, synthetic construct
  source 1..20: mol_type = other RNA
  modified_base 7: mod_base = OTHER; note = 5'-methyluridine-3'-phosphate
  modified_base 11: mod_base = OTHER; note = 5'-methyluridine-3'-phosphate
  modified_base 12: mod_base = OTHER; note = 5'-methyluridine-3'-phosphate
ataaagtgccttacaaatcc

SEQ ID NO: 300 - RNA, 20 nt, synthetic construct
  source 1..20: mol_type = other RNA
  modified_base 13: mod_base = OTHER; note = 5'-methyluridine-3'-phosphate
agacaaaagggataaagtgc

SEQ ID NO: 301 - RNA, 20 nt, synthetic construct
  source 1..20: mol_type = other RNA
  modified_base 10: mod_base = OTHER; note = 5'-methyluridine-3'-phosphate
gatgaaacatgagacaaaag

SEQ ID NO: 302 - RNA, 20 nt, synthetic construct
  source 1..20: mol_type = other RNA
  modified_base 8: mod_base = OTHER; note = 5'-methyluridine-3'-phosphate
  modified_base 9: mod_base = OTHER; note = 5'-methyluridine-3'-phosphate
  modified_base 10: mod_base = OTHER; note = 5'-methyluridine-3'-phosphate
  modified_base 15: mod_base = OTHER; note = 5'-methyluridine-3'-phosphate
tatgccatttacgatgaaac

SEQ ID NO: 303 - RNA, 20 nt, synthetic construct
  source 1..20: mol_type = other RNA
  modified_base 6: mod_base = OTHER; note = 5'-methyluridine-3'-phosphate
  modified_base 10: mod_base = OTHER; note = 5'-methyluridine-3'-phosphate
  modified_base 12: mod_base = OTHER; note = 5'-methyluridine-3'-phosphate
atctctgcctatgccattta

SEQ ID NO: 304 - RNA, 20 nt, synthetic construct
  source 1..20: mol_type = other RNA
  modified_base 6: mod_base = OTHER; note = 5'-methyluridine-3'-phosphate
  modified_base 10: mod_base = OTHER; note = 5'-methyluridine-3'-phosphate
  modified_base 12: mod_base = OTHER; note = 5'-methyluridine-3'-phosphate
  modified_base 15: mod_base = OTHER; note = 5'-methyluridine-3'-phosphate
agaattaggtatcatctctg

SEQ ID NO: 305 - RNA, 20 nt, synthetic construct
  source 1..20: mol_type = other RNA
  modified_base 8: mod_base = OTHER; note = 5'-methyluridine-3'-phosphate
  modified_base 15: mod_base = OTHER; note = 5'-methyluridine-3'-phosphate
aatcaaatgcagaattaggt

SEQ ID NO: 306 - RNA, 20 nt, synthetic construct
  source 1..20: mol_type = other RNA
  modified_base 9: mod_base = OTHER; note = 5'-methyluridine-3'-phosphate
  modified_base 15: mod_base = OTHER; note = 5'-methyluridine-3'-phosphate
acaaaaagtgacaatcaaat

SEQ ID NO: 307 - RNA, 20 nt, synthetic construct
  source 1..20: mol_type = other RNA
  modified_base 9: mod_base = OTHER; note = 5'-methyluridine-3'-phosphate
aatgcaggtacaaaaagtga

SEQ ID NO: 308 - RNA, 20 nt, synthetic construct
  source 1..20: mol_type = other RNA
  modified_base 7: mod_base = OTHER; note = 5'-methyluridine-3'-phosphate
  modified_base 8: mod_base = OTHER; note = 5'-methyluridine-3'-phosphate
  modified_base 12: mod_base = OTHER; note = 5'-methyluridine-3'-phosphate
  modified_base 13: mod_base = OTHER; note = 5'-methyluridine-3'-phosphate
attttattaaattaatgcag

SEQ ID NO: 309 - RNA, 20 nt, synthetic construct
  source 1..20: mol_type = other RNA
  modified_base 10: mod_base = OTHER; note = 5'-methyluridine-3'-phosphate
  modified_base 12: mod_base = OTHER; note = 5'-methyluridine-3'-phosphate
  modified_base 13: mod_base = OTHER; note = 5'-methyluridine-3'-phosphate
  modified_base 14: mod_base = OTHER; note = 5'-methyluridine-3'-phosphate
  modified_base 15: mod_base = OTHER; note = 5'-methyluridine-3'-phosphate
aaataagaatattttattaa

SEQ ID NO: 310 - RNA, 20 nt, synthetic construct
  source 1..20: mol_type = other RNA
  modified_base 10: mod_base = OTHER; note = 5'-methyluridine-3'-phosphate
  modified_base 14: mod_base = OTHER; note = 5'-methyluridine-3'-phosphate
gtaacaaaataaataagaat

SEQ ID NO: 311 - RNA, 20 nt, synthetic construct
  source 1..20: mol_type = other RNA
  modified_base 6: mod_base = OTHER; note = 5'-methyluridine-3'-phosphate
  modified_base 13: mod_base = OTHER; note = 5'-methyluridine-3'-phosphate
tggtgtaccaagtaacaaaa

SEQ ID NO: 312 - RNA, 20 nt, synthetic construct
  source 1..20: mol_type = other RNA
  modified_base 10: mod_base = OTHER; note = 5'-methyluridine-3'-phosphate
  modified_base 13: mod_base = OTHER; note = 5'-methyluridine-3'-phosphate
aaatggacatgctggtgtac

SEQ ID NO: 313 - RNA, 20 nt, synthetic construct
  source 1..20: mol_type = other RNA
aaataaacaagaaaatggac

SEQ ID NO: 314 - RNA, 20 nt, synthetic construct
  source 1..20: mol_type = other RNA
  modified_base 13: mod_base = OTHER; note = 5'-methyluridine-3'-phosphate
ttaaacacaaaataaacaag

SEQ ID NO: 315 - RNA, 20 nt, synthetic construct
  source 1..20: mol_type = other RNA
  modified_base 8: mod_base = OTHER; note = 5'-methyluridine-3'-phosphate
  modified_base 9: mod_base = OTHER; note = 5'-methyluridine-3'-phosphate
  modified_base 10: mod_base = OTHER; note = 5'-methyluridine-3'-phosphate
  modified_base 11: mod_base = OTHER; note = 5'-methyluridine-3'-phosphate
  modified_base 13: mod_base = OTHER; note = 5'-methyluridine-3'-phosphate
  modified_base 14: mod_base = OTHER; note = 5'-methyluridine-3'-phosphate
ctgaacattttattaaacac

SEQ ID NO: 316 - RNA, 20 nt, synthetic construct
  source 1..20: mol_type = other RNA
  modified_base 6: mod_base = OTHER; note = 5'-methyluridine-3'-phosphate
  modified_base 8: mod_base = OTHER; note = 5'-methyluridine-3'-phosphate
  modified_base 9: mod_base = OTHER; note = 5'-methyluridine-3'-phosphate
  modified_base 14: mod_base = OTHER; note = 5'-methyluridine-3'-phosphate
tgggatgttaaactgaacat

SEQ ID NO: 317 - RNA, 20 nt, synthetic construct
  source 1..20: mol_type = other RNA
  modified_base 6: mod_base = OTHER; note = 5'-methyluridine-3'-phosphate
  modified_base 11: mod_base = OTHER; note = 5'-methyluridine-3'-phosphate
ctttctccactgggatgtta

SEQ ID NO: 318 - DNA, 20 bp, synthetic construct
  source 1..20: mol_type = other DNA
  modified_base 1: mod_base = OTHER; note = 2'-O-methylguanosine-3'-phosphorothioate
  modified_base 2: mod_base = OTHER; note = 2'-O-methylguanosine-3'-phosphorothioate
  modified_base 3: mod_base = OTHER; note = 2'-O-methylguanosine-3'-phosphorothioate
  modified_base 4: mod_base = OTHER; note = 2'-O-methyladenosine-3'-phosphorothioate
  modified_base 5: mod_base = OTHER; note = 2'-O-methylcytidine-3'-phosphorothioate
  modified_base 6: mod_base = OTHER; note = 2'-deoxyguanosine-3'-phosphorothioate
  modified_base 7: mod_base = OTHER; note = 5'-methyl-deoxycytidine-3'-phosphorothioate
  modified_base 8: mod_base = OTHER; note = 2'-deoxyguanosine-3'-phosphorothioate
  modified_base 9: mod_base = OTHER; note = 5'-methyl-deoxycytidine-3'-phosphorothioate
  modified_base 10: mod_base = OTHER; note = 5'-methyl-deoxycytidine-3'-phosphorothioate
  modified_base 11: mod_base = OTHER; note = 2'-deoxyadenosine-3'-phosphorothioate
  modified_base 12: mod_base = OTHER; note = 2'-deoxyguanosine-3'-phosphorothioate
  modified_base 13: mod_base = OTHER; note = 5'-methyl-deoxycytidine-3'-phosphorothioate
  modified_base 14: mod_base = OTHER; note = 2'-deoxythymidine-3'-phosphorothioate
  modified_base 15: mod_base = OTHER; note = 2'-deoxyguanosine-3'-phosphorothioate
  modified_base 16: mod_base = OTHER; note = 2'-O-methylcytidine-3'-phosphorothioate
  modified_base 17: mod_base = OTHER; note = 2'-O-methyluridine-3'-phosphorothioate
  modified_base 18: mod_base = OTHER; note = 2'-O-methylcytidine-3'-phosphorothioate
  modified_base 19: mod_base = OTHER; note = 2'-O-methyladenosine-3'-phosphorothioate
  modified_base 20: mod_base = OTHER; note = 2'-O-methylguanosine
  misc_feature 1..5: note = RNA
  misc_feature 16..20: note = RNA
  misc_feature 6..15: note = DNA
gggacgcgccagctgctcag

SEQ ID NO: 319 - DNA, 20 bp, synthetic construct
  source 1..20: mol_type = other DNA
  modified_base 1: mod_base = OTHER; note = 2'-O-methyladenosine-3'-phosphorothioate
  modified_base 2: mod_base = OTHER; note = 2'-O-methylcytidine-3'-phosphorothioate
  modified_base 3: mod_base = OTHER; note = 2'-O-methyluridine-3'-phosphorothioate
  modified_base 4: mod_base = OTHER; note = 2'-O-methylguanosine-3'-phosphorothioate
  modified_base 5: mod_base = OTHER; note = 2'-O-methylguanosine-3'-phosphorothioate
  modified_base 6: mod_base = OTHER; note = 2'-deoxyguanosine-3'-phosphorothioate
  modified_base 7: mod_base = OTHER; note = 2'-deoxyguanosine-3'-phosphorothioate
  modified_base 8: mod_base = OTHER; note = 5'-methyl-deoxycytidine-3'-phosphorothioate
  modified_base 9: mod_base = OTHER; note = 5'-methyl-deoxycytidine-3'-phosphorothioate
  modified_base 10: mod_base = OTHER; note = 2'-deoxyguanosine-3'-phosphorothioate
  modified_base 11: mod_base = OTHER; note = 5'-methyl-deoxycytidine-3'-phosphorothioate
  modified_base 12: mod_base = OTHER; note = 2'-deoxyguanosine-3'-phosphorothioate
  modified_base 13: mod_base = OTHER; note = 5'-methyl-deoxycytidine-3'-phosphorothioate
  modified_base 14: mod_base = OTHER; note = 2'-deoxyguanosine-3'-phosphorothioate
  modified_base 15: mod_base = OTHER; note = 2'-deoxyguanosine-3'-phosphorothioate
  modified_base 16: mod_base = OTHER; note = 2'-O-methylguanosine-3'-phosphorothioate
  modified_base 17: mod_base = OTHER; note = 2'-O-methyladenosine-3'-phosphorothioate
  modified_base 18: mod_base = OTHER; note = 2'-O-methylcytidine-3'-phosphorothioate
  modified_base 19: mod_base = OTHER; note = 2'-O-methylguanosine-3'-phosphorothioate
  modified_base 20: mod_base = OTHER; note = 2'-O-methylcytidine
  misc_feature 1..5: note = RNA
  misc_feature 16..20: note = RNA
  misc_feature 6..15: note = DNA
actggggccgcgcgggacgc

SEQ ID NO: 320 - DNA, 20 bp, synthetic construct
  source 1..20: mol_type = other DNA
  modified_base 1: mod_base = OTHER; note = 2'-O-methyladenosine-3'-phosphorothioate
  modified_base 2: mod_base = OTHER; note = 2'-O-methylguanosine-3'-phosphorothioate
  modified_base 3: mod_base = OTHER; note = 2'-O-methylcytidine-3'-phosphorothioate
  modified_base 4: mod_base = OTHER; note = 2'-O-methyluridine-3'-phosphorothioate
  modified_base 5: mod_base = OTHER; note = 2'-O-methylguanosine-3'-phosphorothioate
  modified_base 6: mod_base = OTHER; note = 5'-methyl-deoxycytidine-3'-phosphorothioate
  modified_base 7: mod_base = OTHER; note = 2'-deoxyguanosine-3'-phosphorothioate
  modified_base 8: mod_base = OTHER; note = 5'-methyl-deoxycytidine-3'-phosphorothioate
  modified_base 9: mod_base = OTHER; note = 2'-deoxyadenosine-3'-phosphorothioate
  modified_base 10: mod_base = OTHER; note = 2'-deoxyguanosine-3'-phosphorothioate
  modified_base 11: mod_base = OTHER; note = 2'-deoxyadenosine-3'-phosphorothioate
  modified_base 12: mod_base = OTHER; note = 2'-deoxyadenosine-3'-phosphorothioate
  modified_base 13: mod_base = OTHER; note = 5'-methyl-deoxycytidine-3'-phosphorothioate
  modified_base 14: mod_base = OTHER; note = 2'-deoxythymidine-3'-phosphorothioate
  modified_base 15: mod_base = OTHER; note = 2'-deoxyguanosine-3'-phosphorothioate
  modified_base 16: mod_base = OTHER; note = 2'-O-methylguanosine-3'-phosphorothioate
  modified_base 17: mod_base = OTHER; note = 2'-O-methylguanosine-3'-phosphorothioate
  modified_base 18: mod_base = OTHER; note = 2'-O-methylguanosine-3'-phosphorothioate
  modified_base 19: mod_base = OTHER; note = 2'-O-methylcytidine-3'-phosphorothioate
  modified_base 20: mod_base = OTHER; note = 2'-O-methylcytidine
  misc_feature 1..5: note = RNA
  misc_feature 16..20: note = RNA
  misc_feature 6..15: note = DNA
agctgcgcagaactggggcc

SEQ ID NO: 321 - DNA, 20 bp, synthetic construct
  source 1..20: mol_type = other DNA
  modified_base 1: mod_base = OTHER; note = 2'-O-methyladenosine-3'-phosphorothioate
  modified_base 2: mod_base = OTHER; note = 2'-O-methylguanosine-3'-phosphorothioate
  modified_base 3: mod_base = OTHER; note = 2'-O-methylcytidine-3'-phosphorothioate
  modified_base 4: mod_base = OTHER; note = 2'-O-methylcytidine-3'-phosphorothioate
  modified_base 5: mod_base = OTHER; note = 2'-O-methyluridine-3'-phosphorothioate
  modified_base 6: mod_base = OTHER; note = 5'-methyl-deoxycytidine-3'-phosphorothioate
  modified_base 7: mod_base = OTHER; note = 2'-deoxyguanosine-3'-phosphorothioate
  modified_base 8: mod_base = OTHER; note = 2'-deoxyguanosine-3'-phosphorothioate
  modified_base 9: mod_base = OTHER; note = 2'-deoxyguanosine-3'-phosphorothioate
  modified_base 10: mod_base = OTHER; note = 2'-deoxyadenosine-3'-phosphorothioate
  modified_base 11: mod_base = OTHER; note = 2'-deoxyadenosine-3'-phosphorothioate
  modified_base 12: mod_base = OTHER; note = 2'-deoxyguanosine-3'-phosphorothioate
  modified_base 13: mod_base = OTHER; note = 5'-methyl-deoxycytidine-3'-phosphorothioate
  modified_base 14: mod_base = OTHER; note = 2'-deoxythymidine-3'-phosphorothioate
  modified_base 15: mod_base = OTHER; note = 2'-deoxyguanosine-3'-phosphorothioate
  modified_base 16: mod_base = OTHER; note = 2'-O-methylcytidine-3'-phosphorothioate
  modified_base 17: mod_base = OTHER; note = 2'-O-methylguanosine-3'-phosphorothioate
  modified_base 18: mod_base = OTHER; note = 2'-O-methylcytidine-3'-phosphorothioate
  modified_base 19: mod_base = OTHER; note = 2'-O-methyladenosine-3'-phosphorothioate
  modified_base 20: mod_base = OTHER; note = 2'-O-methylguanosine
  misc_feature 1..5: note = RNA
  misc_feature 16..20: note = RNA
  misc_feature 6..15: note = DNA
agcctcgggaagctgcgcag

SEQ ID NO: 322 - DNA, 20 bp, synthetic construct
  source 1..20: mol_type = other DNA
  modified_base 1: mod_base = OTHER; note = 2'-O-methylcytidine-3'-phosphorothioate
  modified_base 2: mod_base = OTHER; note = 2'-O-methylguanosine-3'-phosphorothioate
  modified_base 3: mod_base = OTHER; note = 2'-O-methylguanosine-3'-phosphorothioate
  modified_base 4: mod_base = OTHER; note = 2'-O-methylcytidine-3'-phosphorothioate
  modified_base 5: mod_base = OTHER; note = 2'-O-methyluridine-3'-phosphorothioate
  modified_base 6: mod_base = OTHER; note = 2'-deoxyguanosine-3'-phosphorothioate
  modified_base 7: mod_base = OTHER; note = 2'-deoxyguanosine-3'-phosphorothioate
  modified_base 8: mod_base = OTHER; note = 2'-deoxythymidine-3'-phosphorothioate
  modified_base 9: mod_base = OTHER; note = 2'-deoxyguanosine-3'-phosphorothioate
  modified_base 10: mod_base = OTHER; note = 5'-methyl-deoxycytidine-3'-phosphorothioate
  modified_base 11: mod_base = OTHER; note = 2'-deoxyguanosine-3'-phosphorothioate
  modified_base 12: mod_base = OTHER; note = 2'-deoxyguanosine-3'-phosphorothioate
  modified_base 13: mod_base = OTHER; note = 2'-deoxyadenosine-3'-phosphorothioate
  modified_base 14: mod_base = OTHER; note = 2'-deoxyguanosine-3'-phosphorothioate
  modified_base 15: mod_base = OTHER; note = 5'-methyl-deoxycytidine-3'-phosphorothioate
  modified_base 16: mod_base = OTHER; note = 2'-O-methylcytidine-3'-phosphorothioate
  modified_base 17: mod_base = OTHER; note = 2'-O-methyluridine-3'-phosphorothioate
  modified_base 18: mod_base = OTHER; note = 2'-O-methylcytidine-3'-phosphorothioate
  modified_base 19: mod_base = OTHER; note = 2'-O-methylguanosine-3'-phosphorothioate
  modified_base 20: mod_base = OTHER; note = 2'-O-methylguanosine
  misc_feature 1..5: note = RNA
  misc_feature 16..20: note = RNA
  misc_feature 6..15: note = DNA
cggctggtgcggagcctcgg

SEQ ID NO: 323 - DNA, 20 bp, synthetic construct
  source 1..20: mol_type = other DNA
  modified_base 1: mod_base = OTHER; note = 2'-O-methyladenosine-3'-phosphorothioate
  modified_base 2: mod_base = OTHER; note = 2'-O-methylcytidine-3'-phosphorothioate
  modified_base 3: mod_base = OTHER; note = 2'-O-methyladenosine-3'-phosphorothioate
  modified_base 4: mod_base = OTHER; note = 2'-O-methylguanosine-3'-phosphorothioate
  modified_base 5: mod_base = OTHER; note = 2'-O-methyladenosine-3'-phosphorothioate
  modified_base 6: mod_base = OTHER; note = 2'-deoxyadenosine-3'-phosphorothioate
  modified_base 7: mod_base = OTHER; note = 2'-deoxyguanosine-3'-phosphorothioate
  modified_base 8: mod_base = OTHER; note = 5'-methyl-deoxycytidine-3'-phosphorothioate
  modified_base 9: mod_base = OTHER; note = 2'-deoxyguanosine-3'-phosphorothioate
  modified_base 10: mod_base = OTHER; note = 5'-methyl-deoxycytidine-3'-phosphorothioate
  modified_base 11: mod_base = OTHER; note = 2'-deoxyguanosine-3'-phosphorothioate
  modified_base 12: mod_base = OTHER; note = 2'-deoxyguanosine-3'-phosphorothioate
  modified_base 13: mod_base = OTHER; note = 5'-methyl-deoxycytidine-3'-phosphorothioate
  modified_base 14: mod_base = OTHER; note = 2'-deoxythymidine-3'-phosphorothioate
  modified_base 15: mod_base = OTHER; note = 2'-deoxyguanosine-3'-phosphorothioate
  modified_base 16: mod_base = OTHER; note = 2'-O-methylguanosine-3'-phosphorothioate
  modified_base 17: mod_base = OTHER; note = 2'-O-methyluridine-3'-phosphorothioate
  modified_base 18: mod_base = OTHER; note = 2'-O-methylguanosine-3'-phosphorothioate
  modified_base 19: mod_base = OTHER; note = 2'-O-methylcytidine-3'-phosphorothioate
  modified_base 20: mod_base = OTHER; note = 2'-O-methylguanosine
  misc_feature 1..5: note = RNA
  misc_feature 16..20: note = RNA
  misc_feature 6..15: note = DNA
acagaagcgcggctggtgcg

SEQ ID NO: 324 - DNA, 20 bp, synthetic construct
  source 1..20: mol_type = other DNA
  modified_base 1: mod_base = OTHER; note = 2'-O-methylguanosine-3'-phosphorothioate
  modified_base 2: mod_base = OTHER; note = 2'-O-methylcytidine-3'-phosphorothioate
  modified_base 3: mod_base = OTHER; note = 2'-O-methylcytidine-3'-phosphorothioate
  modified_base 4: mod_base = OTHER; note = 2'-O-methylcytidine-3'-phosphorothioate
  modified_base 5: mod_base = OTHER; note = 2'-O-methyluridine-3'-phosphorothioate
  modified_base 6: mod_base = OTHER; note = 2'-deoxyguanosine-3'-phosphorothioate
  modified_base 7: mod_base = OTHER; note = 5'-methyl-deoxycytidine-3'-phosphorothioate
  modified_base 8: mod_base = OTHER; note = 2'-deoxyadenosine-3'-phosphorothioate
  modified_base 9: mod_base = OTHER; note = 2'-deoxyguanosine-3'-phosphorothioate
  modified_base 10: mod_base = OTHER; note = 2'-deoxyguanosine-3'-phosphorothioate
  modified_base 11: mod_base = OTHER; note = 5'-methyl-deoxycytidine-3'-phosphorothioate
  modified_base 12: mod_base = OTHER; note = 2'-deoxyguanosine-3'-phosphorothioate
  modified_base 13: mod_base = OTHER; note = 2'-deoxyguanosine-3'-phosphorothioate
  modified_base 14: mod_base = OTHER; note = 2'-deoxyadenosine-3'-phosphorothioate
  modified_base 15: mod_base = OTHER; note = 5'-methyl-deoxycytidine-3'-phosphorothioate
  modified_base 16: mod_base = OTHER; note = 2'-O-methyladenosine-3'-phosphorothioate
  modified_base 17: mod_base = OTHER; note = 2'-O-methylguanosine-3'-phosphorothioate
  modified_base 18: mod_base = OTHER; note = 2'-O-methyladenosine-3'-phosphorothioate
  modified_base 19: mod_base = OTHER; note = 2'-O-methyladenosine-3'-phosphorothioate
  modified_base 20: mod_base = OTHER; note = 2'-O-methylguanosine
  misc_feature 1..5: note = RNA
  misc_feature 16..20: note = RNA
  misc_feature 6..15: note = DNA
gccctgcaggcggacagaag

SEQ ID NO: 325 - DNA, 20 bp, synthetic construct
  source 1..20: mol_type = other DNA
  modified_base 1: mod_base = OTHER; note = 2'-O-methylcytidine-3'-phosphorothioate
  modified_base 2: mod_base = OTHER; note = 2'-O-methyluridine-3'-phosphorothioate
  modified_base 3: mod_base = OTHER; note = 2'-O-methyluridine-3'-phosphorothioate
  modified_base 4: mod_base = OTHER; note = 2'-O-methyluridine-3'-phosphorothioate
  modified_base 5: mod_base = OTHER; note = 2'-O-methylcytidine-3'-phosphorothioate
  modified_base 6: mod_base = OTHER; note = 2'-deoxythymidine-3'-phosphorothioate
  modified_base 7: mod_base = OTHER; note = 2'-deoxyguanosine-3'-phosphorothioate
  modified_base 8: mod_base = OTHER; note = 2'-deoxyguanosine-3'-phosphorothioate
  modified_base 9: mod_base = OTHER; note = 2'-deoxyadenosine-3'-phosphorothioate
  modified_base 10: mod_base = OTHER; note = 2'-deoxyadenosine-3'-phosphorothioate
  modified_base 11: mod_base = OTHER; note = 2'-deoxythymidine-3'-phosphorothioate
  modified_base 12: mod_base = OTHER; note = 2'-deoxyguanosine-3'-phosphorothioate
  modified_base 13: mod_base = OTHER; note = 5'-methyl-deoxycytidine-3'-phosphorothioate
  modified_base 14: mod_base = OTHER; note = 5'-methyl-deoxycytidine-3'-phosphorothioate
  modified_base 15: mod_base = OTHER; note = 5'-methyl-deoxycytidine-3'-phosphorothioate
  modified_base 16: mod_base = OTHER; note = 2'-O-methyluridine-3'-phosphorothioate
  modified_base 17: mod_base = OTHER; note = 2'-O-methylguanosine-3'-phosphorothioate
  modified_base 18: mod_base = OTHER; note = 2'-O-methylcytidine-3'-phosphorothioate
  modified_base 19: mod_base = OTHER; note = 2'-O-methyladenosine-3'-phosphorothioate
  modified_base 20: mod_base = OTHER; note = 2'-O-methylguanosine
  misc_feature 1..5: note = RNA
  misc_feature 16..20: note = RNA
  misc_feature 6..15: note = DNA
ctttctggaatgccctgcag

SEQ ID NO: 326 - DNA, 20 bp, synthetic construct
  source 1..20: mol_type = other DNA
  modified_base 1: mod_base = OTHER; note = 2'-O-methyladenosine-3'-phosphorothioate
  modified_base 2: mod_base = OTHER; note = 2'-O-methyluridine-3'-phosphorothioate
  modified_base 3: mod_base = OTHER; note = 2'-O-methyladenosine-3'-phosphorothioate
  modified_base 4: mod_base = OTHER; note = 2'-O-methyluridine-3'-phosphorothioate
  modified_base 5: mod_base = OTHER; note = 2'-O-methylcytidine-3'-phosphorothioate
  modified_base 6: mod_base = OTHER; note = 5'-methyl-deoxycytidine-3'-phosphorothioate
  modified_base 7: mod_base = OTHER; note = 2'-deoxythymidine-3'-phosphorothioate
  modified_base 8: mod_base = OTHER; note = 5'-methyl-deoxycytidine-3'-phosphorothioate
  modified_base 9: mod_base = OTHER; note = 2'-deoxyadenosine-3'-phosphorothioate
  modified_base 10: mod_base = OTHER; note = 2'-deoxythymidine-3'-phosphorothioate
  modified_base 11: mod_base = OTHER; note = 5'-methyl-deoxycytidine-3'-phosphorothioate
  modified_base 12: mod_base = OTHER; note = 2'-deoxythymidine-3'-phosphorothioate
  modified_base 13: mod_base = OTHER; note = 2'-deoxythymidine-3'-phosphorothioate
  modified_base 14: mod_base = OTHER; note = 2'-deoxythymidine-3'-phosphorothioate
  modified_base 15: mod_base = OTHER; note = 5'-methyl-deoxycytidine-3'-phosphorothioate
  modified_base 16: mod_base = OTHER; note = 2'-O-methyluridine-3'-phosphorothioate
  modified_base 17: mod_base = OTHER; note = 2'-O-methylguanosine-3'-phosphorothioate
  modified_base 18: mod_base = OTHER; note = 2'-O-methylguanosine-3'-phosphorothioate
  modified_base 19: mod_base = OTHER; note = 2'-O-methyladenosine-3'-phosphorothioate
  modified_base 20: mod_base = OTHER; note = 2'-O-methyladenosine
  misc_feature 1..5: note = RNA
  misc_feature 16..20: note = RNA
  misc_feature 6..15: note = DNA
atatcctcatctttctggaa

SEQ ID NO: 327 - DNA, 20 bp, synthetic construct
  source 1..20: mol_type = other DNA
  modified_base 1: mod_base = OTHER; note = 2'-O-methyladenosine-3'-phosphorothioate
  modified_base 2: mod_base = OTHER; note = 2'-O-methyladenosine-3'-phosphorothioate
  modified_base 3: mod_base = OTHER; note = 2'-O-methylguanosine-3'-phosphorothioate
  modified_base 4: mod_base = OTHER; note = 2'-O-methyladenosine-3'-phosphorothioate
  modified_base 5: mod_base = OTHER; note = 2'-O-methylcytidine-3'-phosphorothioate
  modified_base 6: mod_base = OTHER; note = 2'-deoxyadenosine-3'-phosphorothioate
  modified_base 7: mod_base = OTHER; note = 2'-deoxyguanosine-3'-phosphorothioate
  modified_base 8: mod_base = OTHER; note = 5'-methyl-deoxycytidine-3'-phosphorothioate
  modified_base 9: mod_base = OTHER; note = 2'-deoxyadenosine-3'-phosphorothioate
  modified_base 10: mod_base = OTHER; note = 2'-deoxyadenosine-3'-phosphorothioate
  modified_base 11: mod_base = OTHER; note = 2'-deoxyadenosine-3'-phosphorothioate
  modified_base 12: mod_base = OTHER; note = 2'-deoxythymidine-3'-phosphorothioate
  modified_base 13: mod_base = OTHER; note = 2'-deoxyadenosine-3'-phosphorothioate
  modified_base 14: mod_base = OTHER; note = 2'-deoxythymidine-3'-phosphorothioate
  modified_base 15: mod_base = OTHER; note = 5'-methyl-deoxycytidine-3'-phosphorothioate
  modified_base 16: mod_base = OTHER; note = 2'-O-methylcytidine-3'-phosphorothioate
  modified_base 17: mod_base = OTHER; note = 2'-O-methyluridine-3'-phosphorothioate
  modified_base 18: mod_base = OTHER; note = 2'-O-methylcytidine-3'-phosphorothioate
  modified_base 19: mod_base = OTHER; note = 2'-O-methyladenosine-3'-phosphorothioate
  modified_base 20: mod_base = OTHER; note = 2'-O-methyluridine
  misc_feature 1..5: note = RNA
  misc_feature 16..20: note = RNA
  misc_feature 6..15: note = DNA
aagacagcaaatatcctcat

SEQ ID NO: 328 - DNA, 20 bp, synthetic construct
  source 1..20: mol_type = other DNA
  modified_base 1: mod_base = OTHER; note = 2'-O-methylguanosine-3'-phosphorothioate
  modified_base 2: mod_base = OTHER; note = 2'-O-methylguanosine-3'-phosphorothioate
  modified_base 3: mod_base = OTHER; note = 2'-O-methyluridine-3'-phosphorothioate
  modified_base 4: mod_base = OTHER; note = 2'-O-methylcytidine-3'-phosphorothioate
  modified_base 5: mod_base = OTHER; note = 2'-O-methyladenosine-3'-phosphorothioate
  modified_base 6: mod_base = OTHER; note = 2'-deoxythymidine-3'-phosphorothioate
  modified_base 7: mod_base = OTHER; note = 2'-deoxyguanosine-3'-phosphorothioate
  modified_base 8: mod_base = OTHER; note = 2'-deoxyadenosine-3'-phosphorothioate
  modified_base 9: mod_base = OTHER; note = 2'-deoxyadenosine-3'-phosphorothioate
  modified_base 10: mod_base = OTHER; note = 2'-deoxythymidine-3'-phosphorothioate
  modified_base 11: mod_base = OTHER; note = 2'-deoxyadenosine-3'-phosphorothioate
  modified_base 12: mod_base = OTHER; note = 2'-deoxythymidine-3'-phosphorothioate
  modified_base 13: mod_base = OTHER; note = 2'-deoxyadenosine-3'-phosphorothioate
  modified_base 14: mod_base = OTHER; note = 2'-deoxyadenosine-3'-phosphorothioate
  modified_base 15: mod_base = OTHER; note = 2'-deoxyadenosine-3'-phosphorothioate
  modified_base 16: mod_base = OTHER; note = 2'-O-methylguanosine-3'-phosphorothioate
  modified_base 17: mod_base = OTHER; note = 2'-O-methyladenosine-3'-phosphorothioate
  modified_base 18: mod_base = OTHER; note = 2'-O-methylcytidine-3'-phosphorothioate
  modified_base 19: mod_base = OTHER; note = 2'-O-methyladenosine-3'-phosphorothioate
  modified_base 20: mod_base = OTHER; note = 2'-O-methylguanosine
  misc_feature 1..5: note = RNA
  misc_feature 16..20: note = RNA
  misc_feature 6..15: note = DNA
ggtcatgaatataaagacag

SEQ ID NO: 329 - DNA, 20 bp, synthetic construct
  source 1..20: mol_type = other DNA
  modified_base 1: mod_base = OTHER; note = 2'-O-methyladenosine-3'-phosphorothioate
  modified_base 2: mod_base = OTHER; note = 2'-O-methyladenosine-3'-phosphorothioate
  modified_base 3: mod_base = OTHER; note = 2'-O-methyluridine-3'-phosphorothioate
  modified_base 4: mod_base = OTHER; note = 2'-O-methylguanosine-3'-phosphorothioate
  modified_base 5: mod_base = OTHER; note = 2'-O-methylcytidine-3'-phosphorothioate
  modified_base 6: mod_base = OTHER; note = 5'-methyl-deoxycytidine-3'-phosphorothioate
  modified_base 7: mod_base = OTHER; note = 2'-deoxyadenosine-3'-phosphorothioate
  modified_base 8: mod_base = OTHER; note = 2'-deoxyguanosine-3'-phosphorothioate
  modified_base 9: mod_base = OTHER; note = 2'-deoxythymidine-3'-phosphorothioate
  modified_base 10: mod_base = OTHER; note = 2'-deoxyadenosine-3'-phosphorothioate
  modified_base 11: mod_base = OTHER; note = 2'-deoxyguanosine-3'-phosphorothioate
  modified_base 12: mod_base = OTHER; note = 2'-deoxyguanosine-3'-phosphorothioate
  modified_base 13: mod_base = OTHER; note = 2'-deoxythymidine-3'-phosphorothioate
  modified_base 14: mod_base = OTHER; note = 5'-methyl-deoxycytidine-3'-phosphorothioate
  modified_base 15: mod_base = OTHER; note = 2'-deoxyadenosine-3'-phosphorothioate
  modified_base 16: mod_base = OTHER; note = 2'-O-methyluridine-3'-phosphorothioate
  modified_base 17: mod_base = OTHER; note = 2'-O-methylguanosine-3'-phosphorothioate
  modified_base 18: mod_base = OTHER; note = 2'-O-methyladenosine-3'-phosphorothioate
  modified_base 19: mod_base = OTHER; note = 2'-O-methyladenosine-3'-phosphorothioate
  modified_base 20: mod_base = OTHER; note = 2'-O-methyluridine
  misc_feature 1..5: note = RNA
  misc_feature 16..20: note = RNA
  misc_feature 6..15: note = DNA
aatgccagtaggtcatgaat

SEQ ID NO: 330 - DNA, 20 bp, synthetic construct
  source 1..20: mol_type = other DNA
  modified_base 1: mod_base = OTHER; note = 2'-O-methylguanosine-3'-phosphorothioate
  modified_base 2: mod_base = OTHER; note = 2'-O-methylguanosine-3'-phosphorothioate
  modified_base 3: mod_base = OTHER; note = 2'-O-methylguanosine-3'-phosphorothioate
  modified_base 4: mod_base = OTHER; note = 2'-O-methylcytidine-3'-phosphorothioate
  modified_base 5: mod_base = OTHER; note = 2'-O-methylguanosine-3'-phosphorothioate
  modified_base 6: mod_base = OTHER; note = 2'-deoxythymidine-3'-phosphorothioate
  modified_base 7: mod_base = OTHER; note = 2'-deoxythymidine-3'-phosphorothioate
  modified_base 8: mod_base = OTHER; note = 5'-methyl-deoxycytidine-3'-phosphorothioate
  modified_base 9: mod_base = OTHER; note = 2'-deoxyadenosine-3'-phosphorothioate
  modified_base 10: mod_base = OTHER; note = 2'-deoxyguanosine-3'-phosphorothioate
  modified_base 11: mod_base = OTHER; note = 5'-methyl-deoxycytidine-3'-phosphorothioate
  modified_base 12: mod_base = OTHER; note = 2'-deoxyadenosine-3'-phosphorothioate
  modified_base 13: mod_base = OTHER; note = 2'-deoxyadenosine-3'-phosphorothioate
  modified_base 14: mod_base = OTHER; note = 2'-deoxyadenosine-3'-phosphorothioate
  modified_base 15: mod_base = OTHER; note = 2'-deoxythymidine-3'-phosphorothioate
  modified_base 16: mod_base = OTHER; note = 2'-O-methylguanosine-3'-phosphorothioate
  modified_base 17: mod_base = OTHER; note = 2'-O-methylcytidine-3'-phosphorothioate
  modified_base 18: mod_base = OTHER; note = 2'-O-methylcytidine-3'-phosphorothioate
  modified_base 19: mod_base = OTHER; note = 2'-O-methyladenosine-3'-phosphorothioate
  modified_base 20: mod_base = OTHER; note = 2'-O-methylguanosine
  misc_feature 1..5: note = RNA
  misc_feature 16..20: note = RNA
  misc_feature 6..15: note = DNA
gggcgttcagcaaatgccag

SEQ ID NO: 331 - DNA, 20 bp, synthetic construct
  source 1..20: mol_type = other DNA
  modified_base 1: mod_base = OTHER; note = 2'-O-methyluridine-3'-phosphorothioate
  modified_base 2: mod_base = OTHER; note = 2'-O-methyluridine-3'-phosphorothioate
  modified_base 3: mod_base = OTHER; note = 2'-O-methylguanosine-3'-phosphorothioate
  modified_base 4: mod_base = OTHER; note = 2'-O-methyluridine-3'-phosphorothioate
  modified_base 5: mod_base = OTHER; note = 2'-O-methyluridine-3'-phosphorothioate
  modified_base 6: mod_base = OTHER; note = 2'-deoxyguanosine-3'-phosphorothioate
  modified_base 7: mod_base = OTHER; note = 2'-deoxythymidine-3'-phosphorothioate
  modified_base 8: mod_base = OTHER; note = 2'-deoxyadenosine-3'-phosphorothioate
  modified_base 9: mod_base = OTHER; note = 2'-deoxythymidine-3'-phosphorothioate
  modified_base 10: mod_base = OTHER; note = 2'-deoxyguanosine-3'-phosphorothioate
  modified_base 11: mod_base = OTHER; note = 2'-deoxyguanosine-3'-phosphorothioate
  modified_base 12: mod_base = OTHER; note = 2'-deoxyguanosine-3'-phosphorothioate
  modified_base 13: mod_base = OTHER; note = 2'-deoxyguanosine-3'-phosphorothioate
  modified_base 14: mod_base = OTHER; note = 5'-methyl-deoxycytidine-3'-phosphorothioate
  modified_base 15: mod_base = OTHER; note = 2'-deoxyguanosine-3'-phosphorothioate
  modified_base 16: mod_base = OTHER; note = 2'-O-methyluridine-3'-phosphorothioate
  modified_base 17: mod_base = OTHER; note = 2'-O-methyluridine-3'-phosphorothioate
  modified_base 18: mod_base = OTHER; note = 2'-O-methylcytidine-3'-phosphorothioate
  modified_base 19: mod_base = OTHER; note = 2'-O-methyladenosine-3'-phosphorothioate
  modified_base 20: mod_base = OTHER; note = 2'-O-methylguanosine
  misc_feature 1..5: note = RNA
  misc_feature 16..20: note = RNA
  misc_feature 6..15: note = DNA
ttgttgtatggggcgttcag

SEQ ID NO: 332 - DNA, 20 bp, synthetic construct
  source 1..20: mol_type = other DNA
  modified_base 1: mod_base = OTHER; note = 2'-O-methyluridine-3'-phosphorothioate
  modified_base 2: mod_base = OTHER; note = 2'-O-methyluridine-3'-phosphorothioate
  modified_base 3: mod_base = OTHER; note = 2'-O-methyluridine-3'-phosphorothioate
  modified_base 4: mod_base = OTHER; note = 2'-O-methylguanosine-3'-phosphorothioate
  modified_base 5: mod_base = OTHER; note = 2'-O-methylguanosine-3'-phosphorothioate
  modified_base 6: mod_base = OTHER; note = 2'-deoxythymidine-3'-phosphorothioate
  modified_base 7: mod_base = OTHER; note = 2'-deoxythymidine-3'-phosphorothioate
  modified_base 8: mod_base = OTHER; note = 2'-deoxyguanosine-3'-phosphorothioate
  modified_base 9: mod_base = OTHER; note = 2'-deoxyadenosine-3'-phosphorothioate
  modified_base 10: mod_base = OTHER; note = 2'-deoxythymidine-3'-phosphorothioate
  modified_base 11: mod_base = OTHER; note = 2'-deoxythymidine-3'-phosphorothioate
  modified_base 12: mod_base = OTHER; note = 2'-deoxythymidine-3'-phosphorothioate
  modified_base 13: mod_base = OTHER; note = 2'-deoxythymidine-3'-phosphorothioate
  modified_base 14: mod_base = OTHER; note = 2'-deoxyguanosine-3'-phosphorothioate
  modified_base 15: mod_base = OTHER; note = 2'-deoxythymidine-3'-phosphorothioate
  modified_base 16: mod_base = OTHER; note = 2'-O-methyluridine-3'-phosphorothioate
  modified_base 17: mod_base = OTHER; note = 2'-O-methylguanosine-3'-phosphorothioate
  modified_base 18: mod_base = OTHER; note = 2'-O-methyluridine-3'-phosphorothioate
  modified_base 19: mod_base = OTHER; note = 2'-O-methyladenosine-3'-phosphorothioate
  modified_base 20: mod_base = OTHER; note = 2'-O-methyluridine
  misc_feature 1..5: note = RNA
  misc_feature 16..20: note = RNA
  misc_feature 6..15: note = DNA
tttggttgattttgttgtat

SEQ ID NO: 333 - DNA, 20 bp, synthetic construct
  source 1..20: mol_type = other DNA
  modified_base 1: mod_base = OTHER; note = 2'-O-methyladenosine-3'-phosphorothioate
  modified_base 2: mod_base = OTHER; note = 2'-O-methylcytidine-3'-phosphorothioate
  modified_base 3: mod_base = OTHER; note = 2'-O-methylcytidine-3'-phosphorothioate
  modified_base 4: mod_base = OTHER; note = 2'-O-methyladenosine-3'-phosphorothioate
  modified_base 5: mod_base = OTHER; note = 2'-O-methyladenosine-3'-phosphorothioate
  modified_base 6: mod_base = OTHER; note = 2'-deoxyadenosine-3'-phosphorothioate
  modified_base 7: mod_base = OTHER; note = 2'-deoxyadenosine-3'-phosphorothioate
  modified_base 8: mod_base = OTHER; note = 2'-deoxythymidine-3'-phosphorothioate
  modified_base 9: mod_base = OTHER; note = 2'-deoxythymidine-3'-phosphorothioate
  modified_base 10: mod_base = OTHER; note = 5'-methyl-deoxycytidine-3'-phosphorothioate
  modified_base 11: mod_base = OTHER; note = 2'-deoxythymidine-3'-phosphorothioate
  modified_base 12: mod_base = OTHER; note = 2'-deoxythymidine-3'-phosphorothioate
  modified_base 13: mod_base = OTHER; note = 2'-deoxythymidine-3'-phosphorothioate
  modified_base 14: mod_base = OTHER; note = 2'-deoxyguanosine-3'-phosphorothioate
  modified_base 15: mod_base = OTHER; note = 2'-deoxyguanosine-3'-phosphorothioate
  modified_base 16: mod_base = OTHER; note = 2'-O-methyluridine-3'-phosphorothioate
  modified_base 17: mod_base = OTHER; note = 2'-O-methyluridine-3'-phosphorothioate
  modified_base 18: mod_base = OTHER; note = 2'-O-methylguanosine-3'-phosphorothioate
  modified_base 19: mod_base = OTHER; note = 2'-O-methyladenosine-3'-phosphorothioate
  modified_base 20: mod_base = OTHER; note = 2'-O-methyluridine
  misc_feature 1..5: note = RNA
  misc_feature 16..20: note = RNA
  misc_feature 6..15: note = DNA
accaaaattctttggttgat

SEQ ID NO: 334 - DNA, 20 bp, synthetic construct
  source 1..20: mol_type = other DNA
  modified_base 1: mod_base = OTHER; note = 2'-O-methyladenosine-3'-phosphorothioate
  modified_base 2: mod_base = OTHER; note = 2'-O-methylcytidine-3'-phosphorothioate
  modified_base 3: mod_base = OTHER; note = 2'-O-methyluridine-3'-phosphorothioate
  modified_base 4: mod_base = OTHER; note = 2'-O-methylguanosine-3'-phosphorothioate
  modified_base 5: mod_base = OTHER; note = 2'-O-methylguanosine-3'-phosphorothioate
  modified_base 6: mod_base = OTHER; note = 2'-deoxyadenosine-3'-phosphorothioate
  modified_base 7: mod_base = OTHER; note = 2'-deoxythymidine-3'-phosphorothioate
  modified_base 8: mod_base = OTHER; note = 5'-methyl-deoxycytidine-3'-phosphorothioate
  modified_base 9: mod_base = OTHER; note = 5'-methyl-deoxycytidine-3'-phosphorothioate
  modified_base 10: mod_base = OTHER; note = 2'-deoxyadenosine-3'-phosphorothioate
  modified_base 11: mod_base = OTHER; note = 5'-methyl-deoxycytidine-3'-phosphorothioate
  modified_base 12: mod_base = OTHER; note = 2'-deoxyadenosine-3'-phosphorothioate
  modified_base 13: mod_base = OTHER; note = 2'-deoxyadenosine-3'-phosphorothioate
  modified_base 14: mod_base = OTHER; note = 5'-methyl-deoxycytidine-3'-phosphorothioate
  modified_base 15: mod_base = OTHER; note = 5'-methyl-deoxycytidine-3'-phosphorothioate
  modified_base 16: mod_base = OTHER; note = 2'-O-methyladenosine-3'-phosphorothioate
  modified_base 17: mod_base = OTHER; note = 2'-O-methyladenosine-3'-phosphorothioate
  modified_base 18: mod_base = OTHER; note = 2'-O-methyladenosine-3'-phosphorothioate
  modified_base 19: mod_base = OTHER; note = 2'-O-methyladenosine-3'-phosphorothioate
  modified_base 20: mod_base = OTHER; note = 2'-O-methyluridine
  misc_feature 1..5: note = RNA
  misc_feature 16..20: note = RNA
  misc_feature 6..15: note = DNA
actggatccacaaccaaaat

SEQ ID NO: 335 - DNA, 20 bp, synthetic construct
  source 1..20: mol_type = other DNA
  modified_base 1: mod_base = OTHER; note = 2'-O-methyluridine-3'-phosphorothioate
  modified_base 2: mod_base = OTHER; note = 2'-O-methylguanosine-3'-phosphorothioate
  modified_base 3: mod_base = OTHER; note = 2'-O-methyluridine-3'-phosphorothioate
  modified_base 4: mod_base = OTHER; note = 2'-O-methyluridine-3'-phosphorothioate
  modified_base 5: mod_base = OTHER; note = 2'-O-methylcytidine-3'-phosphorothioate
  modified_base 6: mod_base = OTHER; note = 2'-deoxyadenosine-3'-phosphorothioate
  modified_base 7: mod_base = OTHER; note = 2'-deoxyguanosine-3'-phosphorothioate
  modified_base 8: mod_base = OTHER; note = 2'-deoxyadenosine-3'-phosphorothioate
  modified_base 9: mod_base = OTHER; note = 2'-deoxyguanosine-3'-phosphorothioate
  modified_base 10: mod_base = OTHER; note = 2'-deoxyguanosine-3'-phosphorothioate
  modified_base 11: mod_base = OTHER; note = 2'-deoxythymidine-3'-phosphorothioate
  modified_base 12: mod_base = OTHER; note = 2'-deoxyguanosine-3'-phosphorothioate
  modified_base 13: mod_base = OTHER; note = 2'-deoxyadenosine-3'-phosphorothioate
  modified_base 14: mod_base = OTHER; note = 5'-methyl-deoxycytidine-3'-phosphorothioate
  modified_base 15: mod_base = OTHER; note = 2'-deoxythymidine-3'-phosphorothioate
  modified_base 16: mod_base = OTHER; note = 2'-O-methylguanosine-3'-phosphorothioate
  modified_base 17: mod_base = OTHER; note = 2'-O-methylguanosine-3'-phosphorothioate
  modified_base 18: mod_base = OTHER; note = 2'-O-methyladenosine-3'-phosphorothioate
  modified_base 19: mod_base = OTHER; note = 2'-O-methyluridine-3'-phosphorothioate
  modified_base 20: mod_base = OTHER; note = 2'-O-methylcytidine
  misc_feature 1..5: note = RNA
  misc_feature 16..20: note = RNA
  misc_feature 6..15: note = DNA
tgttcagaggtgactggatc

SEQ ID NO: 336 - DNA, 20 bp, synthetic construct
  source 1..20: mol_type = other DNA
  modified_base 1: mod_base = OTHER; note = 2'-O-methyladenosine-3'-phosphorothioate
  modified_base 2: mod_base = OTHER; note = 2'-O-methyluridine-3'-phosphorothioate
  modified_base 3: mod_base = OTHER; note = 2'-O-methylguanosine-3'-phosphorothioate
  modified_base 4: mod_base = OTHER; note = 2'-O-methyluridine-3'-phosphorothioate
  modified_base 5: mod_base = OTHER; note = 2'-O-methylcytidine-3'-phosphorothioate
  modified_base 6: mod_base = OTHER; note = 2'-deoxyadenosine-3'-phosphorothioate
  modified_base 7: mod_base = OTHER; note = 2'-deoxyguanosine-3'-phosphorothioate
  modified_base 8: mod_base = OTHER; note = 2'-deoxythymidine-3'-phosphorothioate
  modified_base 9: mod_base = OTHER; note = 2'-deoxythymidine-3'-phosphorothioate
  modified_base 10: mod_base = OTHER; note = 5'-methyl-deoxycytidine-3'-phosphorothioate
  modified_base 11: mod_base = OTHER; note = 2'-deoxyadenosine-3'-phosphorothioate
  modified_base 12: mod_base = OTHER; note = 2'-deoxythymidine-3'-phosphorothioate
  modified_base 13: mod_base = OTHER; note = 2'-deoxyguanosine-3'-phosphorothioate
  modified_base 14: mod_base = OTHER; note = 2'-deoxythymidine-3'-phosphorothioate
  modified_base 15: mod_base = OTHER; note = 2'-deoxythymidine-3'-phosphorothioate
  modified_base 16: mod_base = OTHER; note = 2'-O-methylcytidine-3'-phosphorothioate
  modified_base 17: mod_base = OTHER; note = 2'-O-methyladenosine-3'-phosphorothioate
  modified_base 18: mod_base = OTHER; note = 2'-O-methylguanosine-3'-phosphorothioate
  modified_base 19: mod_base = OTHER; note = 2'-O-methyladenosine-3'-phosphorothioate
  modified_base 20: mod_base = OTHER; note = 2'-O-methylguanosine
  misc_feature 1..5: note = RNA
  misc_feature 16..20: note = RNA
  misc_feature 6..15: note = DNA
atgtcagttcatgttcagag

SEQ ID NO: 337 - DNA, 20 bp, synthetic construct
  source 1..20: mol_type = other DNA
  modified_base 1: mod_base = OTHER; note = 2'-O-methylcytidine-3'-phosphorothioate
  modified_base 2: mod_base = OTHER; note = 2'-O-methyluridine-3'-phosphorothioate
  modified_base 3: mod_base = OTHER; note = 2'-O-methylcytidine-3'-phosphorothioate
  modified_base 4: mod_base = OTHER; note = 2'-O-methyladenosine-3'-phosphorothioate
  modified_base 5: mod_base = OTHER; note = 2'-O-methylguanosine-3'-phosphorothioate
  modified_base 6: mod_base = OTHER; note = 5'-methyl-deoxycytidine-3'-phosphorothioate
  modified_base 7: mod_base = OTHER; note = 5'-methyl-deoxycytidine-3'-phosphorothioate
  modified_base 8: mod_base = OTHER; note = 2'-deoxythymidine-3'-phosphorothioate
  modified_base 9: mod_base = OTHER; note = 2'-deoxyguanosine-3'-phosphorothioate
  modified_base 10: mod_base = OTHER; note = 2'-deoxyadenosine-3'-phosphorothioate
  modified_base 11: mod_base = OTHER; note = 5'-methyl-deoxycytidine-3'-phosphorothioate
  modified_base 12: mod_base = OTHER; note = 2'-deoxyadenosine-3'-phosphorothioate
  modified_base 13: mod_base = OTHER; note = 2'-deoxythymidine-3'-phosphorothioate
  modified_base 14: mod_base = OTHER; note = 2'-deoxyguanosine-3'-phosphorothioate
  modified_base 15: mod_base = OTHER; note = 2'-deoxythymidine-3'-phosphorothioate
  modified_base 16: mod_base = OTHER; note = 2'-O-methylcytidine-3'-phosphorothioate
  modified_base 17: mod_base = OTHER; note = 2'-O-methyladenosine-3'-phosphorothioate
  modified_base 18: mod_base = OTHER; note = 2'-O-methylguanosine-3'-phosphorothioate
  modified_base 19: mod_base = OTHER; note = 2'-O-methyluridine-3'-phosphorothioate
  modified_base 20: mod_base = OTHER; note = 2'-O-methyluridine
  misc_feature 1..5: note = RNA
  misc_feature 16..20: note = RNA
  misc_feature 6..15: note = DNA
ctcagcctgacatgtcagtt

SEQ ID NO: 338 - DNA, 20 bp, synthetic construct
  source 1..20: mol_type = other DNA
  modified_base 1: mod_base = OTHER; note = 2'-O-methyluridine-3'-phosphorothioate
  modified_base 2: mod_base = OTHER; note = 2'-O-methylguanosine-3'-phosphorothioate
  modified_base 3: mod_base = OTHER; note = 2'-O-methylguanosine-3'-phosphorothioate
  modified_base 4: mod_base = OTHER; note = 2'-O-methylguanosine-3'-phosphorothioate
  modified_base 5: mod_base = OTHER; note = 2'-O-methylguanosine-3'-phosphorothioate
  modified_base 6: mod_base = OTHER; note = 2'-deoxythymidine-3'-phosphorothioate
  modified_base 7: mod_base = OTHER; note = 2'-deoxyadenosine-3'-phosphorothioate
  modified_base 8: mod_base = OTHER; note = 2'-deoxyguanosine-3'-phosphorothioate
  modified_base 9: mod_base = OTHER; note = 5'-methyl-deoxycytidine-3'-phosphorothioate
  modified_base 10: mod_base = OTHER; note = 5'-methyl-deoxycytidine-3'-phosphorothioate
  modified_base 11: mod_base = OTHER; note = 5'-methyl-deoxycytidine-3'-phosphorothioate
  modified_base 12: mod_base = OTHER; note = 2'-deoxythymidine-3'-phosphorothioate
  modified_base 13: mod_base = OTHER; note = 5'-methyl-deoxycytidine-3'-phosphorothioate
  modified_base 14: mod_base = OTHER; note = 2'-deoxyadenosine-3'-phosphorothioate
  modified_base 15: mod_base = OTHER; note = 2'-deoxyguanosine-3'-phosphorothioate
  modified_base 16: mod_base = OTHER; note = 2'-O-methylcytidine-3'-phosphorothioate
  modified_base 17: mod_base = OTHER; note = 2'-O-methylcytidine-3'-phosphorothioate
  modified_base 18: mod_base = OTHER; note = 2'-O-methyluridine-3'-phosphorothioate
  modified_base 19: mod_base = OTHER; note = 2'-O-methylguanosine-3'-phosphorothioate
  modified_base 20: mod_base = OTHER; note = 2'-O-methyladenosine
  misc_feature 1..5: note = RNA
  misc_feature 16..20: note = RNA
  misc_feature 6..15: note = DNA
tggggtagccctcagcctga

SEQ ID NO: 339 - DNA, 20 bp, synthetic construct
  source 1..20: mol_type = other DNA
  modified_base 1: mod_base = OTHER; note = 2'-O-methyluridine-3'-phosphorothioate
  modified_base 2: mod_base = OTHER; note = 2'-O-methylguanosine-3'-phosphorothioate
  modified_base 3: mod_base = OTHER; note = 2'-O-methyladenosine-3'-phosphorothioate
  modified_base 4: mod_base = OTHER; note = 2'-O-methylcytidine-3'-phosphorothioate
  modified_base 5: mod_base = OTHER; note = 2'-O-methyluridine-3'-phosphorothioate
  modified_base 6: mod_base = OTHER; note = 2'-deoxythymidine-3'-phosphorothioate
  modified_base 7: mod_base = OTHER; note = 5'-methyl-deoxycytidine-3'-phosphorothioate
  modified_base 8: mod_base = OTHER; note = 2'-deoxyguanosine-3'-phosphorothioate
  modified_base 9: mod_base = OTHER; note = 2'-deoxyguanosine-3'-phosphorothioate
  modified_base 10: mod_base = OTHER; note = 5'-methyl-deoxycytidine-3'-phosphorothioate
  modified_base 11: mod_base = OTHER; note = 5'-methyl-deoxycytidine-3'-phosphorothioate
  modified_base 12: mod_base = OTHER; note = 2'-deoxythymidine-3'-phosphorothioate
  modified_base 13: mod_base = OTHER; note = 2'-deoxythymidine-3'-phosphorothioate
  modified_base 14: mod_base = OTHER; note = 2'-deoxyguanosine-3'-phosphorothioate
  modified_base 15: mod_base = OTHER; note = 2'-deoxyguanosine-3'-phosphorothioate
  modified_base 16: mod_base = OTHER; note = 2'-O-methylguanosine-3'-phosphorothioate
  modified_base 17: mod_base = OTHER; note = 2'-O-methylguanosine-3'-phosphorothioate
  modified_base 18: mod_base = OTHER; note = 2'-O-methyluridine-3'-phosphorothioate
  modified_base 19: mod_base = OTHER; note = 2'-O-methyladenosine-3'-phosphorothioate
  modified_base 20: mod_base = OTHER; note = 2'-O-methylguanosine
  misc_feature 1..5: note = RNA
  misc_feature 16..20: note = RNA
  misc_feature 6..15: note = DNA
tgacttcggccttggggtag

SEQ ID NO: 340 - DNA, 20 bp, synthetic construct
  source 1..20: mol_type = other DNA
  modified_base 1: mod_base = OTHER; note = 2'-O-methyluridine-3'-phosphorothioate
  modified_base 2: mod_base = OTHER; note = 2'-O-methyluridine-3'-phosphorothioate
  modified_base 3: mod_base = OTHER; note = 2'-O-methylguanosine-3'-phosphorothioate
  modified_base 4: mod_base = OTHER; note = 2'-O-methyluridine-3'-phosphorothioate
  modified_base 5: mod_base = OTHER; note = 2'-O-methylcytidine-3'-phosphorothioate
  modified_base 6: mod_base = OTHER; note = 5'-methyl-deoxycytidine-3'-phosphorothioate
  modified_base 7: mod_base = OTHER; note = 2'-deoxyadenosine-3'-phosphorothioate
  modified_base 8: mod_base = OTHER; note = 2'-deoxyguanosine-3'-phosphorothioate
  modified_base 9: mod_base = OTHER; note = 2'-deoxyadenosine-3'-phosphorothioate
  modified_base 10: mod_base = OTHER; note = 2'-deoxythymidine-3'-phosphorothioate
  modified_base 11: mod_base = OTHER; note = 2'-deoxyguanosine-3'-phosphorothioate
  modified_base 12: mod_base = OTHER; note = 2'-deoxyadenosine-3'-phosphorothioate
  modified_base 13: mod_base = OTHER; note = 5'-methyl-deoxycytidine-3'-phosphorothioate
  modified_base 14: mod_base = OTHER; note = 2'-deoxythymidine-3'-phosphorothioate
  modified_base 15: mod_base = OTHER; note = 2'-deoxythymidine-3'-phosphorothioate
  modified_base 16: mod_base = OTHER; note = 2'-O-methylcytidine-3'-phosphorothioate
  modified_base 17: mod_base = OTHER; note = 2'-O-methylguanosine-3'-phosphorothioate
  modified_base 18: mod_base = OTHER; note = 2'-O-methylguanosine-3'-phosphorothioate
  modified_base 19: mod_base = OTHER; note = 2'-O-methylcytidine-3'-phosphorothioate
  modified_base 20: mod_base = OTHER; note = 2'-O-methylcytidine
  misc_feature 1..5: note = RNA
  misc_feature 16..20: note = RNA
  misc_feature 6..15: note = DNA
ttgtccagatgacttcggcc

SEQ ID NO: 341 - DNA, 20 bp, synthetic construct
  source 1..20: mol_type = other DNA
  modified_base 1: mod_base = OTHER; note = 2'-O-methyladenosine-3'-phosphorothioate
  modified_base 2: mod_base = OTHER; note = 2'-O-methyluridine-3'-phosphorothioate
  modified_base 3: mod_base = OTHER; note = 2'-O-methylguanosine-3'-phosphorothioate
  modified_base 4: mod_base = OTHER; note = 2'-O-methylguanosine-3'-phosphorothioate
  modified_base 5: mod_base = OTHER; note = 2'-O-methyluridine-3'-phosphorothioate
  modified_base 6: mod_base = OTHER; note = 5'-methyl-deoxycytidine-3'-phosphorothioate
  modified_base 7: mod_base = OTHER; note = 2'-deoxyadenosine-3'-phosphorothioate
  modified_base 8: mod_base = OTHER; note = 5'-methyl-deoxycytidine-3'-phosphorothioate
  modified_base 9: mod_base = OTHER; note = 2'-deoxythymidine-3'-phosphorothioate
  modified_base 10: mod_base = OTHER; note = 2'-deoxyguanosine-3'-phosphorothioate
  modified_base 11: mod_base = OTHER; note = 5'-methyl-deoxycytidine-3'-phosphorothioate
  modified_base 12: mod_base = OTHER; note = 2'-deoxythymidine-3'-phosphorothioate
  modified_base 13: mod_base = OTHER; note = 2'-deoxythymidine-3'-phosphorothioate
  modified_base 14: mod_base = OTHER; note = 2'-deoxyguanosine-3'-phosphorothioate
  modified_base 15: mod_base = OTHER; note = 2'-deoxythymidine-3'-phosphorothioate
  modified_base 16: mod_base = OTHER; note = 2'-O-methylcytidine-3'-phosphorothioate
  modified_base 17: mod_base = OTHER; note = 2'-O-methylcytidine-3'-phosphorothioate
  modified_base 18: mod_base = OTHER; note = 2'-O-methyladenosine-3'-phosphorothioate
  modified_base 19: mod_base = OTHER; note = 2'-O-methylguanosine-3'-phosphorothioate
  modified_base 20: mod_base = OTHER; note = 2'-O-methyladenosine
  misc_feature 1..5: note = RNA
  misc_feature 16..20: note = RNA
  misc_feature 6..15: note = DNA
atggtcactgcttgtccaga

SEQ ID NO: 342 - DNA, 20 bp, synthetic construct
  source 1..20: mol_type = other DNA
  modified_base 1: mod_base = OTHER; note = 2'-O-methyladenosine-3'-phosphorothioate
  modified_base 2: mod_base = OTHER; note = 2'-O-methylcytidine-3'-phosphorothioate
  modified_base 3: mod_base = OTHER; note = 2'-O-methyluridine-3'-phosphorothioate
  modified_base 4: mod_base = OTHER; note = 2'-O-methylcytidine-3'-phosphorothioate
  modified_base 5: mod_base = OTHER; note = 2'-O-methyladenosine-3'-phosphorothioate
  modified_base 6: mod_base = OTHER; note = 2'-deoxyguanosine-3'-phosphorothioate
  modified_base 7: mod_base = OTHER; note = 2'-deoxyguanosine-3'-phosphorothioate
  modified_base 8: mod_base = OTHER; note = 2'-deoxyadenosine-3'-phosphorothioate
  modified_base 9: mod_base = OTHER; note = 5'-methyl-deoxycytidine-3'-phosphorothioate
  modified_base 10: mod_base = OTHER; note = 2'-deoxythymidine-3'-phosphorothioate
  modified_base 11: mod_base = OTHER; note = 2'-deoxythymidine-3'-phosphorothioate
  modified_base 12: mod_base = OTHER; note = 2'-deoxyguanosine-3'-phosphorothioate
  modified_base 13: mod_base = OTHER; note = 2'-deoxyadenosine-3'-phosphorothioate
  modified_base 14: mod_base = OTHER; note = 2'-deoxythymidine-3'-phosphorothioate
  modified_base 15: mod_base = OTHER; note = 2'-deoxyguanosine-3'-phosphorothioate
  modified_base 16: mod_base = OTHER; note = 2'-O-methylguanosine-3'-phosphorothioate
  modified_base 17: mod_base = OTHER; note = 2'-O-methyluridine-3'-phosphorothioate
  modified_base 18: mod_base = OTHER; note = 2'-O-methylcytidine-3'-phosphorothioate
  modified_base 19: mod_base = OTHER; note = 2'-O-methyladenosine-3'-phosphorothioate
  modified_base 20: mod_base = OTHER; note = 2'-O-methylcytidine
  misc_feature 1..5: note = RNA
  misc_feature 16..20: note = RNA
  misc_feature 6..15: note = DNA
actcaggacttgatggtcac

SEQ ID NO: 343 - DNA, 20 bp, synthetic construct
  source 1..20: mol_type = other DNA
  modified_base 1: mod_base = OTHER; note = 2'-O-methylguanosine-3'-phosphorothioate
  modified_base 2: mod_base = OTHER; note = 2'-O-methyluridine-3'-phosphorothioate
  modified_base 3: mod_base = OTHER; note = 2'-O-methylguanosine-3'-phosphorothioate
  modified_base 4: mod_base = OTHER; note = 2'-O-methylguanosine-3'-phosphorothioate
  modified_base 5: mod_base = OTHER; note = 2'-O-methyluridine-3'-phosphorothioate
  modified_base 6: mod_base = OTHER; note = 5'-methyl-deoxycytidine-3'-phosphorothioate
  modified_base 7: mod_base = OTHER; note = 2'-deoxythymidine-3'-phosphorothioate
  modified_base 8: mod_base = OTHER; note = 2'-deoxythymidine-3'-phosphorothioate
  modified_base 9: mod_base = OTHER; note = 2'-deoxyadenosine-3'-phosphorothioate
  modified_base 10: mod_base = OTHER; note = 5'-methyl-deoxycytidine-3'-phosphorothioate
  modified_base 11: mod_base = OTHER; note = 5'-methyl-deoxycytidine-3'-phosphorothioate
  modified_base 12: mod_base = OTHER; note = 2'-deoxyadenosine-3'-phosphorothioate
  modified_base 13: mod_base = OTHER; note = 5'-methyl-deoxycytidine-3'-phosphorothioate
  modified_base 14: mod_base = OTHER; note = 2'-deoxythymidine-3'-phosphorothioate
  modified_base 15: mod_base = OTHER; note = 5'-methyl-deoxycytidine-3'-phosphorothioate
  modified_base 16: mod_base = OTHER; note = 2'-O-methyladenosine-3'-phosphorothioate
  modified_base 17: mod_base = OTHER; note = 2'-O-methylguanosine-3'-phosphorothioate
  modified_base 18: mod_base = OTHER; note = 2'-O-methylguanosine-3'-phosphorothioate
  modified_base 19: mod_base = OTHER; note = 2'-O-methyladenosine-3'-phosphorothioate
  modified_base 20: mod_base = OTHER; note = 2'-O-methylcytidine
  misc_feature 1..5: note = RNA
  misc_feature 16..20: note = RNA
  misc_feature 6..15: note = DNA
gtggtcttaccactcaggac

SEQ ID NO: 344 - DNA, 20 bp, synthetic construct
  source 1..20: mol_type = other DNA
  modified_base 1: mod_base = OTHER; note = 2'-O-methyladenosine-3'-phosphorothioate
  modified_base 2: mod_base = OTHER; note = 2'-O-methyluridine-3'-phosphorothioate
  modified_base 3: mod_base = OTHER; note = 2'-O-methyluridine-3'-phosphorothioate
  modified_base 4: mod_base = OTHER; note = 2'-O-methylguanosine-3'-phosphorothioate
  modified_base 5: mod_base = OTHER; note = 2'-O-methylguanosine-3'-phosphorothioate
  modified_base 6: mod_base = OTHER; note = 2'-deoxythymidine-3'-phosphorothioate
  modified_base 7: mod_base = OTHER; note = 2'-deoxyguanosine-3'-phosphorothioate
  modified_base 8: mod_base = OTHER; note = 2'-deoxyguanosine-3'-phosphorothioate
  modified_base 9: mod_base = OTHER; note = 2'-deoxythymidine-3'-phosphorothioate
  modified_base 10: mod_base = OTHER; note = 2'-deoxyguanosine-3'-phosphorothioate
  modified_base 11: mod_base = OTHER; note = 2'-deoxyguanosine-3'-phosphorothioate
  modified_base 12: mod_base = OTHER; note = 2'-deoxythymidine-3'-phosphorothioate
  modified_base 13: mod_base = OTHER; note = 2'-deoxyguanosine-3'-phosphorothioate
  modified_base 14: mod_base = OTHER; note = 2'-deoxyguanosine-3'-phosphorothioate
  modified_base 15: mod_base = OTHER; note = 2'-deoxythymidine-3'-phosphorothioate
  modified_base 16: mod_base = OTHER; note = 2'-O-methylcytidine-3'-phosphorothioate
  modified_base 17: mod_base = OTHER; note = 2'-O-methyluridine-3'-phosphorothioate
  modified_base 18: mod_base = OTHER; note = 2'-O-methyluridine-3'-phosphorothioate
  modified_base 19: mod_base = OTHER; note = 2'-O-methyladenosine-3'-phosphorothioate
  modified_base 20: mod_base = OTHER; note = 2'-O-methylcytidine
  misc_feature 1..5: note = RNA
  misc_feature 16..20: note = RNA
  misc_feature 6..15: note = DNA
attggtggtggtggtcttac

SEQ ID NO: 345 - DNA, 20 bp, synthetic construct
  source 1..20: mol_type = other DNA
  modified_base 1: mod_base = OTHER; note = 2'-O-methylcytidine-3'-phosphorothioate
  modified_base 2: mod_base = OTHER; note = 2'-O-methylcytidine-3'-phosphorothioate
  modified_base 3: mod_base = OTHER; note = 2'-O-methyluridine-3'-phosphorothioate
  modified_base 4: mod_base = OTHER; note = 2'-O-methylcytidine-3'-phosphorothioate
  modified_base 5: mod_base = OTHER; note = 2'-O-methyluridine-3'-phosphorothioate
  modified_base 6: mod_base = OTHER; note = 5'-methyl-deoxycytidine-3'-phosphorothioate
  modified_base 7: mod_base = OTHER; note = 2'-deoxythymidine-3'-phosphorothioate
  modified_base 8: mod_base = OTHER; note = 5'-methyl-deoxycytidine-3'-phosphorothioate
  modified_base 9: mod_base = OTHER; note = 2'-deoxythymidine-3'-phosphorothioate
  modified_base 10: mod_base = OTHER; note = 2'-deoxythymidine-3'-phosphorothioate
  modified_base 11: mod_base = OTHER; note = 2'-deoxyguanosine-3'-phosphorothioate
  modified_base 12: mod_base = OTHER; note = 2'-deoxyguanosine-3'-phosphorothioate
  modified_base 13: mod_base = OTHER; note = 2'-deoxyadenosine-3'-phosphorothioate
  modified_base 14: mod_base = OTHER; note = 2'-deoxyadenosine-3'-phosphorothioate
  modified_base 15: mod_base = OTHER; note = 2'-deoxythymidine-3'-phosphorothioate
  modified_base 16: mod_base = OTHER; note = 2'-O-methyluridine-3'-phosphorothioate
  modified_base 17: mod_base = OTHER; note = 2'-O-methylguanosine-3'-phosphorothioate
  modified_base 18: mod_base = OTHER; note = 2'-O-methylguanosine-3'-phosphorothioate
  modified_base 19: mod_base = OTHER; note = 2'-O-methyluridine-3'-phosphorothioate
  modified_base 20: mod_base = OTHER; note = 2'-O-methylguanosine
  misc_feature 1..5: note = RNA
  misc_feature 16..20: note = RNA
  misc_feature 6..15: note = DNA
cctctctcttggaattggtg

SEQ ID NO: 346 - DNA, 20 bp, synthetic construct
  source 1..20: mol_type = other DNA
  modified_base 1: mod_base = OTHER; note = 2'-O-methyladenosine-3'-phosphorothioate
  modified_base 2: mod_base = OTHER; note = 2'-O-methyladenosine-3'-phosphorothioate
  modified_base 3: mod_base = OTHER; note = 2'-O-methyladenosine-3'-phosphorothioate
  modified_base 4: mod_base = OTHER; note = 2'-O-methylguanosine-3'-phosphorothioate
  modified_base 5: mod_base = OTHER; note = 2'-O-methylcytidine-3'-phosphorothioate
  modified_base 6: mod_base = OTHER; note = 2'-deoxythymidine-3'-phosphorothioate
  modified_base 7: mod_base = OTHER; note = 2'-deoxythymidine-3'-phosphorothioate
  modified_base 8: mod_base = OTHER; note = 5'-methyl-deoxycytidine-3'-phosphorothioate
  modified_base 9: mod_base = OTHER; note = 2'-deoxythymidine-3'-phosphorothioate
  modified_base 10: mod_base = OTHER; note = 5'-methyl-deoxycytidine-3'-phosphorothioate
  modified_base 11: mod_base = OTHER; note = 5'-methyl-deoxycytidine-3'-phosphorothioate
  modified_base 12: mod_base = OTHER; note = 2'-deoxythymidine-3'-phosphorothioate
  modified_base 13: mod_base = OTHER; note = 5'-methyl-deoxycytidine-3'-phosphorothioate
  modified_base 14: mod_base = OTHER; note = 2'-deoxythymidine-3'-phosphorothioate
  modified_base 15: mod_base = OTHER; note = 5'-methyl-deoxycytidine-3'-phosphorothioate
  modified_base 16: mod_base = OTHER; note = 2'-O-methyluridine-3'-phosphorothioate
  modified_base 17: mod_base = OTHER; note = 2'-O-methylcytidine-3'-phosphorothioate
  modified_base 18: mod_base = OTHER; note = 2'-O-methyluridine-3'-phosphorothioate
  modified_base 19: mod_base = OTHER; note = 2'-O-methyluridine-3'-phosphorothioate
  modified_base 20: mod_base = OTHER; note = 2'-O-methylguanosine
  misc_feature 1..5: note = RNA
  misc_feature 16..20: note = RNA
  misc_feature 6..15: note = DNA
aaagcttctcctctctcttg

SEQ ID NO: 347 - DNA, 20 bp, synthetic construct
  source 1..20: mol_type = other DNA
  modified_base 1: mod_base = OTHER; note = 2'-O-methyluridine-3'-phosphorothioate
  modified_base 2: mod_base = OTHER; note = 2'-O-methylguanosine-3'-phosphorothioate
  modified_base 3: mod_base = OTHER; note = 2'-O-methylguanosine-3'-phosphorothioate
  modified_base 4: mod_base = OTHER; note = 2'-O-methyluridine-3'-phosphorothioate
  modified_base 5: mod_base = OTHER; note = 2'-O-methylcytidine-3'-phosphorothioate
  modified_base 6: mod_base = OTHER; note = 2'-deoxyadenosine-3'-phosphorothioate
  modified_base 7: mod_base = OTHER; note = 5'-methyl-deoxycytidine-3'-phosphorothioate
  modified_base 8: mod_base = OTHER; note = 2'-deoxyadenosine-3'-phosphorothioate
  modified_base 9: mod_base = OTHER; note = 2'-deoxythymidine-3'-phosphorothioate
  modified_base 10: mod_base = OTHER; note = 2'-deoxythymidine-3'-phosphorothioate
  modified_base 11: mod_base = OTHER; note = 2'-deoxyguanosine-3'-phosphorothioate
  modified_base 12: mod_base = OTHER; note = 2'-deoxyadenosine-3'-phosphorothioate
  modified_base 13: mod_base = OTHER; note = 2'-deoxyadenosine-3'-phosphorothioate
  modified_base 14: mod_base = OTHER; note = 2'-deoxyadenosine-3'-phosphorothioate
  modified_base 15: mod_base = OTHER; note = 2'-deoxyadenosine-3'-phosphorothioate
  modified_base 16: mod_base = OTHER; note = 2'-O-methylguanosine-3'-phosphorothioate
  modified_base 17: mod_base = OTHER; note = 2'-O-methylcytidine-3'-phosphorothioate
  modified_base 18: mod_base = OTHER; note = 2'-O-methyluridine-3'-phosphorothioate
  modified_base 19: mod_base = OTHER; note = 2'-O-methyluridine-3'-phosphorothioate
  modified_base 20: mod_base = OTHER; note = 2'-O-methylcytidine
  misc_feature 1..5: note = RNA
  misc_feature 16..20: note = RNA
  misc_feature 6..15: note = DNA
tggtcacattgaaaagcttc

SEQ ID NO: 348 - DNA, 20 bp, synthetic construct
  source 1..20: mol_type = other DNA
  modified_base 1: mod_base = OTHER; note = 2'-O-methyluridine-3'-phosphorothioate
  modified_base 2: mod_base = OTHER; note = 2'-O-methylcytidine-3'-phosphorothioate
  modified_base 3: mod_base = OTHER; note = 2'-O-methyluridine-3'-phosphorothioate
  modified_base 4: mod_base = OTHER; note = 2'-O-methylcytidine-3'-phosphorothioate
  modified_base 5: mod_base = OTHER; note = 2'-O-methyladenosine-3'-phosphorothioate
  modified_base 6: mod_base = OTHER; note = 2'-deoxyguanosine-3'-phosphorothioate
  modified_base 7: mod_base = OTHER; note = 2'-deoxythymidine-3'-phosphorothioate
  modified_base 8: mod_base = OTHER; note = 2'-deoxyguanosine-3'-phosphorothioate
  modified_base 9: mod_base = OTHER; note = 2'-deoxythymidine-3'-phosphorothioate
  modified_base 10: mod_base = OTHER; note = 2'-deoxyguanosine-3'-phosphorothioate
  modified_base 11: mod_base = OTHER; note = 5'-methyl-deoxycytidine-3'-phosphorothioate
  modified_base 12: mod_base = OTHER; note = 2'-deoxythymidine-3'-phosphorothioate
  modified_base 13: mod_base = OTHER; note = 2'-deoxyguanosine-3'-phosphorothioate
  modified_base 14: mod_base = OTHER; note = 2'-deoxyguanosine-3'-phosphorothioate
  modified_base 15: mod_base = OTHER; note = 2'-deoxythymidine-3'-phosphorothioate
  modified_base 16: mod_base = OTHER; note = 2'-O-methylcytidine-3'-phosphorothioate
  modified_base 17: mod_base = OTHER; note = 2'-O-methyladenosine-3'-phosphorothioate
  modified_base 18: mod_base = OTHER; note = 2'-O-methylcytidine-3'-phosphorothioate
  modified_base 19: mod_base = OTHER; note = 2'-O-methyladenosine-3'-phosphorothioate
  modified_base 20: mod_base = OTHER; note = 2'-O-methyluridine
  misc_feature 1..5: note = RNA
  misc_feature 16..20: note = RNA
  misc_feature 6..15: note = DNA
tctcagtgtgctggtcacat

SEQ ID NO: 349 - DNA, 20 bp, synthetic construct
  source 1..20: mol_type = other DNA
  modified_base 1: mod_base = OTHER; note = 2'-O-methyluridine-3'-phosphorothioate
  modified_base 2: mod_base = OTHER; note = 2'-O-methyluridine-3'-phosphorothioate
  modified_base 3: mod_base = OTHER; note = 2'-O-methylguanosine-3'-phosphorothioate
  modified_base 4: mod_base = OTHER; note = 2'-O-methyluridine-3'-phosphorothioate
  modified_base 5: mod_base = OTHER; note = 2'-O-methylguanosine-3'-phosphorothioate
  modified_base 6: mod_base = OTHER; note = 2'-deoxythymidine-3'-phosphorothioate
  modified_base 7: mod_base = OTHER; note = 2'-deoxythymidine-3'-phosphorothioate
  modified_base 8: mod_base = OTHER; note = 2'-deoxyguanosine-3'-phosphorothioate
  modified_base 9: mod_base = OTHER; note = 2'-deoxyadenosine-3'-phosphorothioate
  modified_base 10: mod_base = OTHER; note = 2'-deoxythymidine-3'-phosphorothioate
  modified_base 11: mod_base = OTHER; note = 2'-deoxythymidine-3'-phosphorothioate
  modified_base 12: mod_base = OTHER; note = 5'-methyl-deoxycytidine-3'-phosphorothioate
  modified_base 13: mod_base = OTHER; note = 2'-deoxythymidine-3'-phosphorothioate
  modified_base 14: mod_base = OTHER; note = 5'-methyl-deoxycytidine-3'-phosphorothioate
  modified_base 15: mod_base = OTHER; note = 2'-deoxyadenosine-3'-phosphorothioate
  modified_base 16: mod_base = OTHER; note = 2'-O-methylguanosine-3'-phosphorothioate
  modified_base 17: mod_base = OTHER; note = 2'-O-methyluridine-3'-phosphorothioate
  modified_base 18: mod_base = OTHER; note = 2'-O-methylguanosine-3'-phosphorothioate
  modified_base 19: mod_base = OTHER; note = 2'-O-methyluridine-3'-phosphorothioate
  modified_base 20: mod_base = OTHER; note = 2'-O-methylguanosine
  misc_feature 1..5: note = RNA
  misc_feature 16..20: note = RNA
  misc_feature 6..15: note = DNA
ttgtgttgattctcagtgtg

SEQ ID NO: 350 - DNA, 20 bp, synthetic construct
  source 1..20: mol_type = other DNA
  modified_base 1: mod_base = OTHER; note = 2'-O-methyluridine-3'-phosphorothioate
  modified_base 2: mod_base = OTHER; note = 2'-O-methylcytidine-3'-phosphorothioate
  modified_base 3: mod_base = OTHER; note = 2'-O-methyluridine-3'-phosphorothioate
  modified_base 4: mod_base = OTHER; note = 2'-O-methylcytidine-3'-phosphorothioate
  modified_base 5: mod_base = OTHER; note = 2'-O-methyladenosine-3'-phosphorothioate
  modified_base 6: mod_base = OTHER; note = 2'-deoxythymidine-3'-phosphorothioate
  modified_base 7: mod_base = OTHER; note = 2'-deoxythymidine-3'-phosphorothioate
  modified_base 8: mod_base = OTHER; note = 2'-deoxyadenosine-3'-phosphorothioate
  modified_base 9: mod_base = OTHER; note = 2'-deoxyguanosine-3'-phosphorothioate
  modified_base 10: mod_base = OTHER; note = 2'-deoxythymidine-3'-phosphorothioate
  modified_base 11: mod_base = OTHER; note = 2'-deoxythymidine-3'-phosphorothioate
  modified_base 12: mod_base = OTHER; note = 2'-deoxyguanosine-3'-phosphorothioate
  modified_base 13: mod_base = OTHER; note = 2'-deoxythymidine-3'-phosphorothioate
  modified_base 14: mod_base = OTHER; note = 2'-deoxythymidine-3'-phosphorothioate
  modified_base 15: mod_base = OTHER; note = 2'-deoxyguanosine-3'-phosphorothioate
  modified_base 16: mod_base = OTHER; note = 2'-O-methyluridine-3'-phosphorothioate
  modified_base 17: mod_base = OTHER; note = 2'-O-methylguanosine-3'-phosphorothioate
  modified_base 18: mod_base = OTHER; note = 2'-O-methyluridine-3'-phosphorothioate
  modified_base 19: mod_base = OTHER; note = 2'-O-methyluridine-3'-phosphorothioate
  modified_base 20: mod_base = OTHER; note = 2'-O-methylguanosine
  misc_feature 1..5: note = RNA
  misc_feature 16..20: note = RNA
  misc_feature 6..15: note = DNA
tctcattagttgttgtgttg

SEQ ID NO: 351 - DNA, 20 bp, synthetic construct
  source 1..20: mol_type = other DNA
  modified_base 1: mod_base = OTHER; note = 2'-O-methyluridine-3'-phosphorothioate
  modified_base 2: mod_base = OTHER; note = 2'-O-methylguanosine-3'-phosphorothioate
  modified_base 3: mod_base = OTHER; note = 2'-O-methylcytidine-3'-phosphorothioate
  modified_base 4: mod_base = OTHER; note = 2'-O-methyladenosine-3'-phosphorothioate
  modified_base 5: mod_base = OTHER; note = 2'-O-methylguanosine-3'-phosphorothioate
  modified_base 6: mod_base = OTHER; note = 2'-deoxythymidine-3'-phosphorothioate
  modified_base 7: mod_base = OTHER; note = 2'-deoxyadenosine-3'-phosphorothioate
  modified_base 8: mod_base = OTHER; note = 2'-deoxyguanosine-3'-phosphorothioate
  modified_base 9: mod_base = OTHER; note = 2'-deoxyadenosine-3'-phosphorothioate
  modified_base 10: mod_base = OTHER; note = 2'-deoxyadenosine-3'-phosphorothioate
  modified_base 11: mod_base = OTHER; note = 2'-deoxyadenosine-3'-phosphorothioate
  modified_base 12: mod_base = OTHER; note = 2'-deoxyadenosine-3'-phosphorothioate
  modified_base 13: mod_base = OTHER; note = 2'-deoxythymidine-3'-phosphorothioate
  modified_base 14: mod_base = OTHER; note = 5'-methyl-deoxycytidine-3'-phosphorothioate
  modified_base 15: mod_base = OTHER; note = 2'-deoxythymidine-3'-phosphorothioate
  modified_base 16: mod_base = OTHER; note = 2'-O-methylcytidine-3'-phosphorothioate
  modified_base 17: mod_base = OTHER; note = 2'-O-methyladenosine-3'-phosphorothioate
  modified_base 18: mod_base = OTHER; note = 2'-O-methyluridine-3'-phosphorothioate
  modified_base 19: mod_base = OTHER; note = 2'-O-methyluridine-3'-phosphorothioate
  modified_base 20: mod_base = OTHER; note = 2'-O-methyladenosine
  misc_feature 1..5: note = RNA
  misc_feature 16..20: note = RNA
  misc_feature 6..15: note = DNA
tgcagtagaaaatctcatta

SEQ ID NO: 352 - DNA, 20 bp, synthetic construct
  source 1..20: mol_type = other DNA
  modified_base 1: mod_base = OTHER; note = 2'-O-methyluridine-3'-phosphorothioate
  modified_base 2: mod_base = OTHER; note = 2'-O-methylcytidine-3'-phosphorothioate
  modified_base 3: mod_base = OTHER; note = 2'-O-methylcytidine-3'-phosphorothioate
  modified_base 4: mod_base = OTHER; note = 2'-O-methyluridine-3'-phosphorothioate
  modified_base 5: mod_base = OTHER; note = 2'-O-methyladenosine-3'-phosphorothioate
  modified_base 6: mod_base = OTHER; note = 2'-deoxyadenosine-3'-phosphorothioate
  modified_base 7: mod_base = OTHER; note = 2'-deoxyadenosine-3'-phosphorothioate
  modified_base 8: mod_base = OTHER; note = 2'-deoxyadenosine-3'-phosphorothioate
  modified_base 9: mod_base = OTHER; note = 2'-deoxyguanosine-3'-phosphorothioate
  modified_base 10: mod_base = OTHER; note = 2'-deoxythymidine-3'-phosphorothioate
  modified_base 11: mod_base = OTHER; note = 2'-deoxyguanosine-3'-phosphorothioate
  modified_base 12: mod_base = OTHER; note = 5'-methyl-deoxycytidine-3'-phosphorothioate
  modified_base 13: mod_base = OTHER; note = 2'-deoxyadenosine-3'-phosphorothioate
  modified_base 14: mod_base = OTHER; note = 2'-deoxyguanosine-3'-phosphorothioate
  modified_base 15: mod_base = OTHER; note = 2'-deoxythymidine-3'-phosphorothioate
  modified_base 16: mod_base = OTHER; note = 2'-O-methyladenosine-3'-phosphorothioate
  modified_base 17: mod_base = OTHER; note = 2'-O-methylguanosine-3'-phosphorothioate
  modified_base 18: mod_base = OTHER; note = 2'-O-methyladenosine-3'-phosphorothioate
  modified_base 19: mod_base = OTHER; note = 2'-O-methyladenosine-3'-phosphorothioate
  modified_base 20: mod_base = OTHER; note = 2'-O-methyladenosine
  misc_feature 1..5: note = RNA
  misc_feature 16..20: note = RNA
  misc_feature 6..15: note = DNA
tcctaaaagtgcagtagaaa

SEQ ID NO: 353 - DNA, 20 bp, synthetic construct
  source 1..20: mol_type = other DNA
  modified_base 1: mod_base = OTHER; note = 2'-O-methyladenosine-3'-phosphorothioate
  modified_base 2: mod_base = OTHER; note = 2'-O-methylguanosine-3'-phosphorothioate
  modified_base 3: mod_base = OTHER; note = 2'-O-methylguanosine-3'-phosphorothioate
  modified_base 4: mod_base = OTHER; note = 2'-O-methyladenosine-3'-phosphorothioate
  modified_base 5: mod_base = OTHER; note = 2'-O-methyluridine-3'-phosphorothioate
  modified_base 6: mod_base = OTHER; note = 5'-methyl-deoxycytidine-3'-phosphorothioate
  modified_base 7: mod_base = OTHER; note = 2'-deoxythymidine-3'-phosphorothioate
  modified_base 8: mod_base = OTHER; note = 2'-deoxyadenosine-3'-phosphorothioate
  modified_base 9: mod_base = OTHER; note = 2'-deoxyadenosine-3'-phosphorothioate
  modified_base 10: mod_base = OTHER; note = 2'-deoxythymidine-3'-phosphorothioate
  modified_base 11: mod_base = OTHER; note = 5'-methyl-deoxycytidine-3'-phosphorothioate
  modified_base 12: mod_base = OTHER; note = 2'-deoxythymidine-3'-phosphorothioate
  modified_base 13: mod_base = OTHER; note = 5'-methyl-deoxycytidine-3'-phosphorothioate
  modified_base 14: mod_base = OTHER; note = 5'-methyl-deoxycytidine-3'-phosphorothioate
  modified_base 15: mod_base = OTHER; note = 2'-deoxythymidine-3'-phosphorothioate
  modified_base 16: mod_base = OTHER; note = 2'-O-methyladenosine-3'-phosphorothioate
  modified_base 17: mod_base = OTHER; note = 2'-O-methyladenosine-3'-phosphorothioate
  modified_base 18: mod_base = OTHER; note = 2'-O-methyladenosine-3'-phosphorothioate
  modified_base 19: mod_base = OTHER; note = 2'-O-methyladenosine-3'-phosphorothioate
  modified_base 20: mod_base = OTHER; note = 2'-O-methylguanosine
  misc_feature 1..5: note = RNA
  misc_feature 16..20: note = RNA
  misc_feature 6..15: note = DNA
aggatctaatctcctaaaag

SEQ ID NO: 354 - DNA, 20 bp, synthetic construct
  source 1..20: mol_type = other DNA
  modified_base 1: mod_base = OTHER; note = 2'-O-methyluridine-3'-phosphorothioate
  modified_base 2: mod_base = OTHER; note = 2'-O-methylguanosine-3'-phosphorothioate
  modified_base 3: mod_base = OTHER; note = 2'-O-methylguanosine-3'-phosphorothioate
  modified_base 4: mod_base = OTHER; note = 2'-O-methyluridine-3'-phosphorothioate
  modified_base 5: mod_base = OTHER; note = 2'-O-methyluridine-3'-phosphorothioate
  modified_base 6: mod_base = OTHER; note = 2'-deoxythymidine-3'-phosphorothioate
  modified_base 7: mod_base = OTHER; note = 2'-deoxythymidine-3'-phosphorothioate
  modified_base 8: mod_base = OTHER; note = 5'-methyl-deoxycytidine-3'-phosphorothioate
  modified_base 9: mod_base = OTHER; note = 5'-methyl-deoxycytidine-3'-phosphorothioate
  modified_base 10: mod_base = OTHER; note = 2'-deoxythymidine-3'-phosphorothioate
  modified_base 11: mod_base = OTHER; note = 5'-methyl-deoxycytidine-3'-phosphorothioate
  modified_base 12: mod_base = OTHER; note = 2'-deoxyadenosine-3'-phosphorothioate
  modified_base 13: mod_base = OTHER; note = 2'-deoxyguanosine-3'-phosphorothioate
  modified_base 14: mod_base = OTHER; note = 2'-deoxyguanosine-3'-phosphorothioate
  modified_base 15: mod_base = OTHER; note = 2'-deoxyadenosine-3'-phosphorothioate
  modified_base 16: mod_base = OTHER; note = 2'-O-methyluridine-3'-phosphorothioate
  modified_base 17: mod_base = OTHER; note = 2'-O-methylcytidine-3'-phosphorothioate
  modified_base 18: mod_base = OTHER; note = 2'-O-methyluridine-3'-phosphorothioate
  modified_base 19: mod_base = OTHER; note = 2'-O-methyladenosine-3'-phosphorothioate
  modified_base 20: mod_base = OTHER; note = 2'-O-methyladenosine
  misc_feature 1..5: note = RNA
  misc_feature 16..20: note = RNA
  misc_feature 6..15: note = DNA
tggttttcctcaggatctaa

SEQ ID NO: 355 - DNA, 20 bp, synthetic construct
  source 1..20: mol_type = other DNA
  modified_base 1: mod_base = OTHER; note = 2'-O-methyladenosine-3'-phosphorothioate
  modified_base 2: mod_base = OTHER; note = 2'-O-methyladenosine-3'-phosphorothioate
  modified_base 3: mod_base = OTHER; note = 2'-O-methyluridine-3'-phosphorothioate
  modified_base 4: mod_base = OTHER; note = 2'-O-methyluridine-3'-phosphorothioate
  modified_base 5: mod_base = OTHER; note = 2'-O-methylcytidine-3'-phosphorothioate
  modified_base 6: mod_base = OTHER; note = 2'-deoxyadenosine-3'-phosphorothioate
  modified_base 7: mod_base = OTHER; note = 2'-deoxyguanosine-3'-phosphorothioate
  modified_base 8: mod_base = OTHER; note = 5'-methyl-deoxycytidine-3'-phosphorothioate
  modified_base 9: mod_base = OTHER; note = 2'-deoxythymidine-3'-phosphorothioate
  modified_base 10: mod_base = OTHER; note = 2'-deoxyguanosine-3'-phosphorothioate
  modified_base 11: mod_base = OTHER; note = 2'-deoxythymidine-3'-phosphorothioate
  modified_base 12: mod_base = OTHER; note = 2'-deoxyadenosine-3'-phosphorothioate
  modified_base 13: mod_base = OTHER; note = 2'-deoxythymidine-3'-phosphorothioate
  modified_base 14: mod_base = OTHER; note = 2'-deoxyguanosine-3'-phosphorothioate
  modified_base 15: mod_base = OTHER; note = 2'-deoxyguanosine-3'-phosphorothioate
  modified_base 16: mod_base = OTHER; note = 2'-O-methyluridine-3'-phosphorothioate
  modified_base 17: mod_base = OTHER; note = 2'-O-methyluridine-3'-phosphorothioate
  modified_base 18: mod_base = OTHER; note = 2'-O-methyluridine-3'-phosphorothioate
  modified_base 19: mod_base = OTHER; note = 2'-O-methyluridine-3'-phosphorothioate
  modified_base 20: mod_base = OTHER; note = 2'-O-methylcytidine
  misc_feature 1..5: note = RNA
  misc_feature 16..20: note = RNA
  misc_feature 6..15: note = DNA
aattcagctgtatggttttc

SEQ ID NO: 356 - DNA, 20 bp, synthetic construct
  source 1..20: mol_type = other DNA
  modified_base 1: mod_base = OTHER; note = 2'-O-methyluridine-3'-phosphorothioate
  modified_base 2: mod_base = OTHER; note = 2'-O-methylguanosine-3'-phosphorothioate
  modified_base 3: mod_base = OTHER; note = 2'-O-methylguanosine-3'-phosphorothioate
  modified_base 4: mod_base = OTHER; note = 2'-O-methylguanosine-3'-phosphorothioate
  modified_base 5: mod_base = OTHER; note = 2'-O-methyladenosine-3'-phosphorothioate
  modified_base 6: mod_base = OTHER; note = 2'-deoxythymidine-3'-phosphorothioate
  modified_base 7: mod_base = OTHER; note = 2'-deoxyguanosine-3'-phosphorothioate
  modified_base 8: mod_base = OTHER; note = 2'-deoxyadenosine-3'-phosphorothioate
  modified_base 9: mod_base = OTHER; note = 5'-methyl-deoxycytidine-3'-phosphorothioate
  modified_base 10: mod_base = OTHER; note = 5'-methyl-deoxycytidine-3'-phosphorothioate
  modified_base 11: mod_base = OTHER; note = 2'-deoxyadenosine-3'-phosphorothioate
  modified_base 12: mod_base = OTHER; note = 2'-deoxyadenosine-3'-phosphorothioate
  modified_base 13: mod_base = OTHER; note = 2'-deoxythymidine-3'-phosphorothioate
  modified_base 14: mod_base = OTHER; note = 2'-deoxythymidine-3'-phosphorothioate
  modified_base 15: mod_base = OTHER; note = 5'-methyl-deoxycytidine-3'-phosphorothioate
  modified_base 16: mod_base = OTHER; note = 2'-O-methyladenosine-3'-phosphorothioate
  modified_base 17: mod_base = OTHER; note = 2'-O-methylguanosine-3'-phosphorothioate
  modified_base 18: mod_base = OTHER; note = 2'-O-methylcytidine-3'-phosphorothioate
  modified_base 19: mod_base = OTHER; note = 2'-O-methyluridine-3'-phosphorothioate
  modified_base 20: mod_base = OTHER; note = 2'-O-methylguanosine
  misc_feature 1..5: note = RNA
  misc_feature 16..20: note = RNA
  misc_feature 6..15: note = DNA
tgggatgaccaattcagctg

SEQ ID NO: 357 - DNA, 20 bp, synthetic construct
  source 1..20: mol_type = other DNA
  modified_base 1: mod_base = OTHER; note = 2'-O-methyladenosine-3'-phosphorothioate
  modified_base 2: mod_base = OTHER; note = 2'-O-methylguanosine-3'-phosphorothioate
  modified_base 3: mod_base = OTHER; note = 2'-O-methyladenosine-3'-phosphorothioate
  modified_base 4: mod_base = OTHER; note = 2'-O-methylguanosine-3'-phosphorothioate
  modified_base 5: mod_base = OTHER; note = 2'-O-methylguanosine-3'-phosphorothioate
  modified_base 6: mod_base = OTHER; note = 2'-deoxythymidine-3'-phosphorothioate
  modified_base 7: mod_base = OTHER; note = 2'-deoxyadenosine-3'-phosphorothioate
  modified_base 8: mod_base = OTHER; note = 2'-deoxyguanosine-3'-phosphorothioate
  modified_base 9: mod_base = OTHER; note = 2'-deoxythymidine-3'-phosphorothioate
  modified_base 10: mod_base = OTHER; note = 2'-deoxythymidine-3'-phosphorothioate
  modified_base 11: mod_base = OTHER; note = 5'-methyl-deoxycytidine-3'-phosphorothioate
  modified_base 12: mod_base = OTHER; note = 2'-deoxythymidine-3'-phosphorothioate
  modified_base 13: mod_base = OTHER; note = 2'-deoxyguanosine-3'-phosphorothioate
  modified_base 14: mod_base = OTHER; note = 2'-deoxyguanosine-3'-phosphorothioate
  modified_base 15: mod_base = OTHER; note = 2'-deoxyguanosine-3'-phosphorothioate
  modified_base 16: mod_base = OTHER; note = 2'-O-methyladenosine-3'-phosphorothioate
  modified_base 17: mod_base = OTHER; note = 2'-O-methyluridine-3'-phosphorothioate
  modified_base 18: mod_base = OTHER; note = 2'-O-methylguanosine-3'-phosphorothioate
  modified_base 19: mod_base = OTHER; note = 2'-O-methyladenosine-3'-phosphorothioate
  modified_base 20: mod_base = OTHER; note = 2'-O-methylcytidine
  misc_feature 1..5: note = RNA
  misc_feature 16..20: note = RNA
  misc_feature 6..15: note = DNA
agaggtagttctgggatgac

SEQ ID NO: 358 - DNA, 20 bp, synthetic construct
  source 1..20: mol_type = other DNA
  modified_base 1: mod_base = OTHER; note = 2'-O-methylguanosine-3'-phosphorothioate
  modified_base 2: mod_base = OTHER; note = 2'-O-methylguanosine-3'-phosphorothioate
  modified_base 3: mod_base = OTHER; note = 2'-O-methyladenosine-3'-phosphorothioate
  modified_base 4: mod_base = OTHER; note = 2'-O-methylguanosine-3'-phosphorothioate
  modified_base 5: mod_base = OTHER; note = 2'-O-methylguanosine-3'-phosphorothioate
  modified_base 6: mod_base = OTHER; note = 2'-deoxyadenosine-3'-phosphorothioate
  modified_base 7: mod_base = OTHER; note = 2'-deoxythymidine-3'-phosphorothioate
  modified_base 8: mod_base = OTHER; note = 2'-deoxyguanosine-3'-phosphorothioate
  modified_base 9: mod_base = OTHER; note = 2'-deoxythymidine-3'-phosphorothioate
  modified_base 10: mod_base = OTHER; note = 2'-deoxyguanosine-3'-phosphorothioate
  modified_base 11: mod_base = OTHER; note = 5'-methyl-deoxycytidine-3'-phosphorothioate
  modified_base 12: mod_base = OTHER; note = 5'-methyl-deoxycytidine-3'-phosphorothioate
  modified_base 13: mod_base = OTHER; note = 2'-deoxyadenosine-3'-phosphorothioate
  modified_base 14: mod_base = OTHER; note = 2'-deoxyguanosine-3'-phosphorothioate
  modified_base 15: mod_base = OTHER; note = 2'-deoxyadenosine-3'-phosphorothioate
  modified_base 16: mod_base = OTHER; note = 2'-O-methylguanosine-3'-phosphorothioate
  modified_base 17: mod_base = OTHER; note = 2'-O-methylguanosine-3'-phosphorothioate
  modified_base 18: mod_base = OTHER; note = 2'-O-methyluridine-3'-phosphorothioate
  modified_base 19: mod_base = OTHER; note = 2'-O-methyladenosine-3'-phosphorothioate
  modified_base 20: mod_base = OTHER; note = 2'-O-methylguanosine
  misc_feature 1..5: note = RNA
  misc_feature 16..20: note = RNA
  misc_feature 6..15: note = DNA
ggaggatgtgccagaggtag

SEQ ID NO: 359 - DNA, 20 bp, synthetic construct
  source 1..20: mol_type = other DNA
  modified_base 1: mod_base = OTHER; note = 2'-O-methylcytidine-3'-phosphorothioate
  modified_base 2: mod_base = OTHER; note = 2'-O-methylcytidine-3'-phosphorothioate
  modified_base 3: mod_base = OTHER; note = 2'-O-methyluridine-3'-phosphorothioate
  modified_base 4: mod_base = OTHER; note = 2'-O-methyluridine-3'-phosphorothioate
  modified_base 5: mod_base = OTHER; note = 2'-O-methyluridine-3'-phosphorothioate
  modified_base 6: mod_base = OTHER; note = 5'-methyl-deoxycytidine-3'-phosphorothioate
  modified_base 7: mod_base = OTHER; note = 2'-deoxyadenosine-3'-phosphorothioate
  modified_base 8: mod_base = OTHER; note = 2'-deoxythymidine-3'-phosphorothioate
  modified_base 9: mod_base = OTHER; note = 2'-deoxythymidine-3'-phosphorothioate
  modified_base 10: mod_base = OTHER; note = 2'-deoxythymidine-3'-phosphorothioate
  modified_base 11: mod_base = OTHER; note = 2'-deoxyguanosine-3'-phosphorothioate
  modified_base 12: mod_base = OTHER; note = 2'-deoxyguanosine-3'-phosphorothioate
  modified_base 13: mod_base = OTHER; note = 2'-deoxyadenosine-3'-phosphorothioate
  modified_base 14: mod_base = OTHER; note = 2'-deoxyguanosine-3'-phosphorothioate
  modified_base 15: mod_base = OTHER; note = 2'-deoxyguanosine-3'-phosphorothioate
  modified_base 16: mod_base = OTHER; note = 2'-O-methyladenosine-3'-phosphorothioate
  modified_base 17: mod_base = OTHER; note = 2'-O-methyluridine-3'-phosphorothioate
  modified_base 18: mod_base = OTHER; note = 2'-O-methylguanosine-3'-phosphorothioate
  modified_base 19: mod_base = OTHER; note = 2'-O-methyluridine-3'-phosphorothioate
  modified_base 20: mod_base = OTHER; note = 2'-O-methylguanosine
  misc_feature 1..5: note = RNA
  misc_feature 16..20: note = RNA
  misc_feature 6..15: note = DNA
cctttcatttggaggatgtg

SEQ ID NO: 360 - DNA, 20 bp, synthetic construct
  source 1..20: mol_type = other DNA
  modified_base 1: mod_base = OTHER; note = 2'-O-methyladenosine-3'-phosphorothioate
  modified_base 2: mod_base = OTHER; note = 2'-O-methylcytidine-3'-phosphorothioate
  modified_base 3: mod_base = OTHER; note = 2'-O-methylcytidine-3'-phosphorothioate
  modified_base 4: mod_base = OTHER; note = 2'-O-methyladenosine-3'-phosphorothioate
  modified_base 5: mod_base = OTHER; note = 2'-O-methyladenosine-3'-phosphorothioate
  modified_base 6: mod_base = OTHER; note = 2'-deoxyguanosine-3'-phosphorothioate
  modified_base 7: mod_base = OTHER; note = 2'-deoxythymidine-3'-phosphorothioate
  modified_base 8: mod_base = OTHER; note = 2'-deoxyguanosine-3'-phosphorothioate
  modified_base 9: mod_base = OTHER; note = 2'-deoxyadenosine-3'-phosphorothioate
  modified_base 10: mod_base = OTHER; note = 2'-deoxyguanosine-3'-phosphorothioate
  modified_base 11: mod_base = OTHER; note = 2'-deoxythymidine-3'-phosphorothioate
  modified_base 12: mod_base = OTHER; note = 5'-methyl-deoxycytidine-3'-phosphorothioate
  modified_base 13: mod_base = OTHER; note = 5'-methyl-deoxycytidine-3'-phosphorothioate
  modified_base 14: mod_base = OTHER; note = 2'-deoxythymidine-3'-phosphorothioate
  modified_base 15: mod_base = OTHER; note = 2'-deoxythymidine-3'-phosphorothioate
  modified_base 16: mod_base = OTHER; note = 2'-O-methyluridine-3'-phosphorothioate
  modified_base 17: mod_base = OTHER; note = 2'-O-methylcytidine-3'-phosphorothioate
  modified_base 18: mod_base = OTHER; note = 2'-O-methyladenosine-3'-phosphorothioate
  modified_base 19: mod_base = OTHER; note = 2'-O-methyluridine-3'-phosphorothioate
  modified_base 20: mod_base = OTHER; note = 2'-O-methyluridine
  misc_feature 1..5: note = RNA
  misc_feature 16..20: note = RNA
  misc_feature 6..15: note = DNA
accaagtgagtcctttcatt

SEQ ID NO: 361 - DNA, 20 bp, synthetic construct
  source 1..20: mol_type = other DNA
  modified_base 1: mod_base = OTHER; note = 2'-O-methylguanosine-3'-phosphorothioate
  modified_base 2: mod_base = OTHER; note = 2'-O-methylcytidine-3'-phosphorothioate
  modified_base 3: mod_base = OTHER; note = 2'-O-methyluridine-3'-phosphorothioate
  modified_base 4: mod_base = OTHER; note = 2'-O-methylcytidine-3'-phosphorothioate
  modified_base 5: mod_base = OTHER; note = 2'-O-methylcytidine-3'-phosphorothioate
  modified_base 6: mod_base = OTHER; note = 5'-methyl-deoxycytidine-3'-phosphorothioate
  modified_base 7: mod_base = OTHER; note = 2'-deoxyadenosine-3'-phosphorothioate
  modified_base 8: mod_base = OTHER; note = 2'-deoxyguanosine-3'-phosphorothioate
  modified_base 9: mod_base = OTHER; note = 2'-deoxyadenosine-3'-phosphorothioate
  modified_base 10: mod_base = OTHER; note = 2'-deoxyadenosine-3'-phosphorothioate
  modified_base 11: mod_base = OTHER; note = 2'-deoxythymidine-3'-phosphorothioate
  modified_base 12: mod_base = OTHER; note = 2'-deoxythymidine-3'-phosphorothioate
  modified_base 13: mod_base = OTHER; note = 2'-deoxyadenosine-3'-phosphorothioate
  modified_base 14: mod_base = OTHER; note = 5'-methyl-deoxycytidine-3'-phosphorothioate
  modified_base 15: mod_base = OTHER; note = 5'-methyl-deoxycytidine-3'-phosphorothioate
  modified_base 16: mod_base = OTHER; note = 2'-O-methyladenosine-3'-phosphorothioate
  modified_base 17: mod_base = OTHER; note = 2'-O-methyladenosine-3'-phosphorothioate
  modified_base 18: mod_base = OTHER; note = 2'-O-methylguanosine-3'-phosphorothioate
  modified_base 19: mod_base = OTHER; note = 2'-O-methyluridine-3'-phosphorothioate
  modified_base 20: mod_base = OTHER; note = 2'-O-methylguanosine
  misc_feature 1..5: note = RNA
  misc_feature 16..20: note = RNA
  misc_feature 6..15: note = DNA
gctcccagaattaccaagtg

SEQ ID NO: 362 - DNA, 20 bp, synthetic construct
  source 1..20: mol_type = other DNA
  modified_base 1: mod_base = OTHER; note = 2'-O-methyluridine-3'-phosphorothioate
  modified_base 2: mod_base = OTHER; note = 2'-O-methyladenosine-3'-phosphorothioate
  modified_base 3: mod_base = OTHER; note = 2'-O-methyladenosine-3'-phosphorothioate
  modified_base 4: mod_base = OTHER; note = 2'-O-methyluridine-3'-phosphorothioate
  modified_base 5: mod_base = OTHER; note = 2'-O-methyladenosine-3'-phosphorothioate
  modified_base 6: mod_base = OTHER; note = 2'-deoxyadenosine-3'-phosphorothioate
  modified_base 7: mod_base = OTHER; note = 2'-deoxyguanosine-3'-phosphorothioate
  modified_base 8: mod_base = OTHER; note = 2'-deoxyadenosine-3'-phosphorothioate
  modified_base 9: mod_base = OTHER; note = 2'-deoxythymidine-3'-phosphorothioate
  modified_base 10: mod_base = OTHER; note = 2'-deoxyguanosine-3'-phosphorothioate
  modified_base 11: mod_base = OTHER; note = 2'-deoxyguanosine-3'-phosphorothioate
  modified_base 12: mod_base = OTHER; note = 5'-methyl-deoxycytidine-3'-phosphorothioate
  modified_base 13: mod_base = OTHER; note = 2'-deoxythymidine-3'-phosphorothioate
  modified_base 14: mod_base = OTHER; note = 5'-methyl-deoxycytidine-3'-phosphorothioate
  modified_base 15: mod_base = OTHER; note = 5'-methyl-deoxycytidine-3'-phosphorothioate
  modified_base 16: mod_base = OTHER; note = 2'-O-methylcytidine-3'-phosphorothioate
  modified_base 17: mod_base = OTHER; note = 2'-O-methyladenosine-3'-phosphorothioate
  modified_base 18: mod_base = OTHER; note = 2'-O-methylguanosine-3'-phosphorothioate
  modified_base 19: mod_base = OTHER; note = 2'-O-methyladenosine-3'-phosphorothioate
  modified_base 20: mod_base = OTHER; note = 2'-O-methyladenosine
  misc_feature 1..5: note = RNA
  misc_feature 16..20: note = RNA
  misc_feature 6..15: note = DNA
taataagatggctcccagaa

SEQ ID NO: 363 - DNA, 20 bp, synthetic construct
  source 1..20: mol_type = other DNA
  modified_base 1: mod_base = OTHER; note = 2'-O-methyladenosine-3'-phosphorothioate
  modified_base 2: mod_base = OTHER; note = 2'-O-methylcytidine-3'-phosphorothioate
  modified_base 3: mod_base = OTHER; note = 2'-O-methyladenosine-3'-phosphorothioate
  modified_base 4: mod_base = OTHER; note = 2'-O-methylcytidine-3'-phosphorothioate
  modified_base 5: mod_base = OTHER; note = 2'-O-methylcytidine-3'-phosphorothioate
  modified_base 6: mod_base = OTHER; note = 2'-deoxyadenosine-3'-phosphorothioate
  modified_base 7: mod_base = OTHER; note = 2'-deoxyadenosine-3'-phosphorothioate
  modified_base 8: mod_base = OTHER; note = 2'-deoxyguanosine-3'-phosphorothioate
  modified_base 9: mod_base = OTHER; note = 2'-deoxyguanosine-3'-phosphorothioate
  modified_base 10: mod_base = OTHER; note = 5'-methyl-deoxycytidine-3'-phosphorothioate
  modified_base 11: mod_base = OTHER; note = 2'-deoxyadenosine-3'-phosphorothioate
  modified_base 12: mod_base = OTHER; note = 2'-deoxythymidine-3'-phosphorothioate
  modified_base 13: mod_base = OTHER; note = 2'-deoxyadenosine-3'-phosphorothioate
  modified_base 14: mod_base = OTHER; note = 2'-deoxyadenosine-3'-phosphorothioate
  modified_base 15: mod_base = OTHER; note = 2'-deoxythymidine-3'-phosphorothioate
  modified_base 16: mod_base = OTHER; note = 2'-O-methyladenosine-3'-phosphorothioate
  modified_base 17: mod_base = OTHER; note = 2'-O-methyladenosine-3'-phosphorothioate
  modified_base 18: mod_base = OTHER; note = 2'-O-methylguanosine-3'-phosphorothioate
  modified_base 19: mod_base = OTHER; note = 2'-O-methyladenosine-3'-phosphorothioate
  modified_base 20: mod_base = OTHER; note = 2'-O-methyluridine
  misc_feature 1..5: note = RNA
  misc_feature 16..20: note = RNA
  misc_feature 6..15: note = DNA
acaccaaggcataataagat

SEQ ID NO: 364 - DNA, 20 bp, synthetic construct
  source 1..20: mol_type = other DNA
  modified_base 1: mod_base = OTHER; note = 2'-O-methyladenosine-3'-phosphorothioate
  modified_base 2: mod_base = OTHER; note = 2'-O-methyladenosine-3'-phosphorothioate
  modified_base 3: mod_base = OTHER; note = 2'-O-methyluridine-3'-phosphorothioate
  modified_base 4: mod_base = OTHER; note = 2'-O-methylguanosine-3'-phosphorothioate
  modified_base 5: mod_base = OTHER; note = 2'-O-methyluridine-3'-phosphorothioate
  modified_base 6: mod_base = OTHER; note = 5'-methyl-deoxycytidine-3'-phosphorothioate
  modified_base 7: mod_base = OTHER; note = 2'-deoxyadenosine-3'-phosphorothioate
  modified_base 8: mod_base = OTHER; note = 2'-deoxyguanosine-3'-phosphorothioate
  modified_base 9: mod_base = OTHER; note = 2'-deoxythymidine-3'-phosphorothioate
  modified_base 10: mod_base = OTHER; note = 2'-deoxyguanosine-3'-phosphorothioate
  modified_base 11: mod_base = OTHER; note = 5'-methyl-deoxycytidine-3'-phosphorothioate
  modified_base 12: mod_base = OTHER; note = 2'-deoxythymidine-3'-phosphorothioate
  modified_base 13: mod_base = OTHER; note = 2'-deoxyadenosine-3'-phosphorothioate
  modified_base 14: mod_base = OTHER; note = 5'-methyl-deoxycytidine-3'-phosphorothioate
  modified_base 15: mod_base = OTHER; note = 2'-deoxyadenosine-3'-phosphorothioate
  modified_base 16: mod_base = OTHER; note = 2'-O-methylcytidine-3'-phosphorothioate
  modified_base 17: mod_base = OTHER; note = 2'-O-methylcytidine-3'-phosphorothioate
  modified_base 18: mod_base = OTHER; note = 2'-O-methyladenosine-3'-phosphorothioate
  modified_base 19: mod_base = OTHER; note = 2'-O-methyladenosine-3'-phosphorothioate
  modified_base 20: mod_base = OTHER; note = 2'-O-methylguanosine
  misc_feature 1..5: note = RNA
  misc_feature 16..20: note = RNA
  misc_feature 6..15: note = DNA
aatgtcagtgctacaccaag

SEQ ID NO: 365 - DNA, 20 bp, synthetic construct
  source 1..20: mol_type = other DNA
  modified_base 1: mod_base = OTHER; note = 2'-O-methyladenosine-3'-phosphorothioate
  modified_base 2: mod_base = OTHER; note = 2'-O-methylcytidine-3'-phosphorothioate
  modified_base 3: mod_base = OTHER; note = 2'-O-methylguanosine-3'-phosphorothioate
  modified_base 4: mod_base = OTHER; note = 2'-O-methylguanosine-3'-phosphorothioate
  modified_base 5: mod_base = OTHER; note = 2'-O-methyladenosine-3'-phosphorothioate
  modified_base 6: mod_base = OTHER; note = 2'-deoxyadenosine-3'-phosphorothioate
  modified_base 7: mod_base = OTHER; note = 2'-deoxyguanosine-3'-phosphorothioate
  modified_base 8: mod_base = OTHER; note = 2'-deoxyadenosine-3'-phosphorothioate
  modified_base 9: mod_base = OTHER; note = 2'-deoxythymidine-3'-phosphorothioate
  modified_base 10: mod_base = OTHER; note = 2'-deoxyguanosine-3'-phosphorothioate
  modified_base 11: mod_base = OTHER; note = 2'-deoxyadenosine-3'-phosphorothioate
  modified_base 12: mod_base = OTHER; note = 2'-deoxyadenosine-3'-phosphorothioate
  modified_base 13: mod_base = OTHER; note = 2'-deoxythymidine-3'-phosphorothioate
  modified_base 14: mod_base = OTHER; note = 2'-deoxyguanosine-3'-phosphorothioate
  modified_base 15: mod_base = OTHER; note = 2'-deoxythymidine-3'-phosphorothioate
  modified_base 16: mod_base = OTHER; note = 2'-O-methylcytidine-3'-phosphorothioate
  modified_base 17: mod_base = OTHER; note = 2'-O-methyladenosine-3'-phosphorothioate
  modified_base 18: mod_base = OTHER; note = 2'-O-methylguanosine-3'-phosphorothioate
  modified_base 19: mod_base = OTHER; note = 2'-O-methyluridine-3'-phosphorothioate
  modified_base 20: mod_base = OTHER; note = 2'-O-methylguanosine
  misc_feature 1..5: note = RNA
  misc_feature 16..20: note = RNA
  misc_feature 6..15: note = DNA
acggaagatgaatgtcagtg

SEQ ID NO: 366 - DNA, 20 bp, synthetic construct
  source 1..20: mol_type = other DNA
  modified_base 1: mod_base = OTHER; note = 2'-O-methyluridine-3'-phosphorothioate
  modified_base 2: mod_base = OTHER; note = 2'-O-methylcytidine-3'-phosphorothioate
  modified_base 3: mod_base = OTHER; note = 2'-O-methylcytidine-3'-phosphorothioate
  modified_base 4: mod_base = OTHER; note = 2'-O-methylcytidine-3'-phosphorothioate
  modified_base 5: mod_base = OTHER; note = 2'-O-methyluridine-3'-phosphorothioate
  modified_base 6: mod_base = OTHER; note = 2'-deoxythymidine-3'-phosphorothioate
  modified_base 7: mod_base = OTHER; note = 2'-deoxythymidine-3'-phosphorothioate
  modified_base 8: mod_base = OTHER; note = 2'-deoxythymidine-3'-phosphorothioate
  modified_base 9: mod_base = OTHER; note = 5'-methyl-deoxycytidine-3'-phosphorothioate
  modified_base 10: mod_base = OTHER; note = 2'-deoxythymidine-3'-phosphorothioate
  modified_base 11: mod_base = OTHER; note = 2'-deoxythymidine-3'-phosphorothioate
  modified_base 12: mod_base = OTHER; note = 2'-deoxyadenosine-3'-phosphorothioate
  modified_base 13: mod_base = OTHER; note = 2'-deoxyadenosine-3'-phosphorothioate
  modified_base 14: mod_base = OTHER; note = 2'-deoxyadenosine-3'-phosphorothioate
  modified_base 15: mod_base = OTHER; note = 5'-methyl-deoxycytidine-3'-phosphorothioate
  modified_base 16: mod_base = OTHER; note = 2'-O-methylguanosine-3'-phosphorothioate
  modified_base 17: mod_base = OTHER; note = 2'-O-methylguanosine-3'-phosphorothioate
  modified_base 18: mod_base = OTHER; note = 2'-O-methyladenosine-3'-phosphorothioate
  modified_base 19: mod_base = OTHER; note = 2'-O-methyladenosine-3'-phosphorothioate
  modified_base 20: mod_base = OTHER; note = 2'-O-methylguanosine
  misc_feature 1..5: note = RNA
  misc_feature 16..20: note = RNA
  misc_feature 6..15: note = DNA
tcccttttcttaaacggaag

SEQ ID NO: 367 - DNA, 20 bp, synthetic construct
  source 1..20: mol_type = other DNA
  modified_base 1: mod_base = OTHER; note = 2'-O-methyladenosine-3'-phosphorothioate
  modified_base 2: mod_base = OTHER; note = 2'-O-methyluridine-3'-phosphorothioate
  modified_base 3: mod_base = OTHER; note = 2'-O-methylcytidine-3'-phosphorothioate
  modified_base 4: mod_base = OTHER; note = 2'-O-methylcytidine-3'-phosphorothioate
  modified_base 5: mod_base = OTHER; note = 2'-O-methyladenosine-3'-phosphorothioate
  modified_base 6: mod_base = OTHER; note = 2'-deoxythymidine-3'-phosphorothioate
  modified_base 7: mod_base = OTHER; note = 5'-methyl-deoxycytidine-3'-phosphorothioate
  modified_base 8: mod_base = OTHER; note = 2'-deoxyadenosine-3'-phosphorothioate
  modified_base 9: mod_base = OTHER; note = 2'-deoxythymidine-3'-phosphorothioate
  modified_base 10: mod_base = OTHER; note = 2'-deoxythymidine-3'-phosphorothioate
  modified_base 11: mod_base = OTHER; note = 5'-methyl-deoxycytidine-3'-phosphorothioate
  modified_base 12: mod_base = OTHER; note = 2'-deoxythymidine-3'-phosphorothioate
  modified_base 13: mod_base = OTHER; note = 5'-methyl-deoxycytidine-3'-phosphorothioate
  modified_base 14: mod_base = OTHER; note = 5'-methyl-deoxycytidine-3'-phosphorothioate
  modified_base 15: mod_base = OTHER; note = 5'-methyl-deoxycytidine-3'-phosphorothioate
  modified_base 16: mod_base = OTHER; note = 2'-O-methyluridine-3'-phosphorothioate
  modified_base 17: mod_base = OTHER; note = 2'-O-methyluridine-3'-phosphorothioate
  modified_base 18: mod_base = OTHER; note = 2'-O-methyluridine-3'-phosphorothioate
  modified_base 19: mod_base = OTHER; note = 2'-O-methyluridine-3'-phosphorothioate
  modified_base 20: mod_base = OTHER; note = 2'-O-methylcytidine
  misc_feature 1..5: note = RNA
  misc_feature 16..20: note = RNA
  misc_feature 6..15: note = DNA
atccatcattctcccttttc

SEQ ID NO: 368 - DNA, 20 bp, synthetic construct
  source 1..20: mol_type = other DNA
  modified_base 1: mod_base = OTHER; note = 2'-O-methyladenosine-3'-phosphorothioate
  modified_base 2: mod_base = OTHER; note = 2'-O-methyluridine-3'-phosphorothioate
  modified_base 3: mod_base = OTHER; note = 2'-O-methyluridine-3'-phosphorothioate
  modified_base 4: mod_base = OTHER; note = 2'-O-methyluridine-3'-phosphorothioate
  modified_base 5: mod_base = OTHER; note = 2'-O-methyluridine-3'-phosphorothioate
  modified_base 6: mod_base = OTHER; note = 2'-deoxythymidine-3'-phosphorothioate
  modified_base 7: mod_base = OTHER; note = 2'-deoxythymidine-3'-phosphorothioate
  modified_base 8: mod_base = OTHER; note = 5'-methyl-deoxycytidine-3'-phosphorothioate
  modified_base 9: mod_base = OTHER; note = 2'-deoxyadenosine-3'-phosphorothioate
  modified_base 10: mod_base = OTHER; note = 5'-methyl-deoxycytidine-3'-phosphorothioate
  modified_base 11: mod_base = OTHER; note = 2'-deoxyadenosine-3'-phosphorothioate
  modified_base 12: mod_base = OTHER; note = 2'-deoxythymidine-3'-phosphorothioate
  modified_base 13: mod_base = OTHER; note = 5'-methyl-deoxycytidine-3'-phosphorothioate
  modified_base 14: mod_base = OTHER; note = 5'-methyl-deoxycytidine-3'-phosphorothioate
  modified_base 15: mod_base = OTHER; note = 2'-deoxyadenosine-3'-phosphorothioate
  modified_base 16: mod_base = OTHER; note = 2'-O-methyluridine-3'-phosphorothioate
  modified_base 17: mod_base = OTHER; note = 2'-O-methylcytidine-3'-phosphorothioate
  modified_base 18: mod_base = OTHER; note = 2'-O-methyladenosine-3'-phosphorothioate
  modified_base 19: mod_base = OTHER; note = 2'-O-methyluridine-3'-phosphorothioate
  modified_base 20: mod_base = OTHER; note = 2'-O-methyluridine
  misc_feature 1..5: note = RNA
  misc_feature 16..20: note = RNA
  misc_feature 6..15: note = DNA
attttttcacatccatcatt

SEQ ID NO: 369 - DNA, 20 bp, synthetic construct
  source 1..20: mol_type = other DNA
  modified_base 1: mod_base = OTHER; note = 2'-O-methyluridine-3'-phosphorothioate
  modified_base 2: mod_base = OTHER; note = 2'-O-methylguanosine-3'-phosphorothioate
  modified_base 3: mod_base = OTHER; note = 2'-O-methylguanosine-3'-phosphorothioate
  modified_base 4: mod_base = OTHER; note = 2'-O-methyladenosine-3'-phosphorothioate
  modified_base 5: mod_base = OTHER; note = 2'-O-methyluridine-3'-phosphorothioate
  modified_base 6: mod_base = OTHER; note = 2'-deoxyguanosine-3'-phosphorothioate
  modified_base 7: mod_base = OTHER; note = 5'-methyl-deoxycytidine-3'-phosphorothioate
  modified_base 8: mod_base = OTHER; note = 5'-methyl-deoxycytidine-3'-phosphorothioate
  modified_base 9: mod_base = OTHER; note = 2'-deoxyadenosine-3'-phosphorothioate
  modified_base 10: mod_base = OTHER; note = 5'-methyl-deoxycytidine-3'-phosphorothioate
  modified_base 11: mod_base = OTHER; note = 2'-deoxyadenosine-3'-phosphorothioate
  modified_base 12: mod_base = OTHER; note = 2'-deoxythymidine-3'-phosphorothioate
  modified_base 13: mod_base = OTHER; note = 2'-deoxythymidine-3'-phosphorothioate
  modified_base 14: mod_base = OTHER; note = 2'-deoxythymidine-3'-phosphorothioate
  modified_base 15: mod_base = OTHER; note = 2'-deoxythymidine-3'-phosphorothioate
  modified_base 16: mod_base = OTHER; note = 2'-O-methyluridine-3'-phosphorothioate
  modified_base 17: mod_base = OTHER; note = 2'-O-methyluridine-3'-phosphorothioate
  modified_base 18: mod_base = OTHER; note = 2'-O-methylcytidine-3'-phosphorothioate
  modified_base 19: mod_base = OTHER; note = 2'-O-methyladenosine-3'-phosphorothioate
  modified_base 20: mod_base = OTHER; note = 2'-O-methylcytidine
  misc_feature 1..5: note = RNA
  misc_feature 16..20: note = RNA
  misc_feature 6..15: note = DNA
tggatgccacattttttcac

SEQ ID NO: 370 - DNA, 20 bp, synthetic construct
  source 1..20: mol_type = other DNA
  modified_base 1: mod_base = OTHER; note = 2'-O-methyladenosine-3'-phosphorothioate
  modified_base 2: mod_base = OTHER; note = 2'-O-methylguanosine-3'-phosphorothioate
  modified_base 3: mod_base = OTHER; note = 2'-O-methyluridine-3'-phosphorothioate
  modified_base 4: mod_base = OTHER; note = 2'-O-methyluridine-3'-phosphorothioate
  modified_base 5: mod_base = OTHER; note = 2'-O-methyluridine-3'-phosphorothioate
  modified_base 6: mod_base = OTHER; note = 2'-deoxyguanosine-3'-phosphorothioate
  modified_base 7: mod_base = OTHER; note = 2'-deoxythymidine-3'-phosphorothioate
  modified_base 8: mod_base = OTHER; note = 2'-deoxyadenosine-3'-phosphorothioate
  modified_base 9: mod_base = OTHER; note = 2'-deoxythymidine-3'-phosphorothioate
  modified_base 10: mod_base = OTHER; note = 5'-methyl-deoxycytidine-3'-phosphorothioate
  modified_base 11: mod_base = OTHER; note = 2'-deoxythymidine-3'-phosphorothioate
  modified_base 12: mod_base = OTHER; note = 2'-deoxythymidine-3'-phosphorothioate
  modified_base 13: mod_base = OTHER; note = 2'-deoxyguanosine-3'-phosphorothioate
  modified_base 14: mod_base = OTHER; note = 2'-deoxyguanosine-3'-phosphorothioate
  modified_base 15: mod_base = OTHER; note = 2'-deoxyadenosine-3'-phosphorothioate
  modified_base 16: mod_base = OTHER; note = 2'-O-methyluridine-3'-phosphorothioate
  modified_base 17: mod_base = OTHER; note = 2'-O-methylguanosine-3'-phosphorothioate
  modified_base 18: mod_base = OTHER; note = 2'-O-methylcytidine-3'-phosphorothioate
  modified_base 19: mod_base = OTHER; note = 2'-O-methylcytidine-3'-phosphorothioate
  modified_base 20: mod_base = OTHER; note = 2'-O-methyladenosine
  misc_feature 1..5: note = RNA
  misc_feature 16..20: note = RNA
  misc_feature 6..15: note = DNA
agtttgtatcttggatgcca

SEQ ID NO: 371 - DNA, 20 bp, synthetic construct
  source 1..20: mol_type = other DNA
  modified_base 1: mod_base = OTHER; note = 2'-O-methylcytidine-3'-phosphorothioate
  modified_base 2: mod_base = OTHER; note = 2'-O-methyluridine-3'-phosphorothioate
  modified_base 3: mod_base = OTHER; note = 2'-O-methyluridine-3'-phosphorothioate
  modified_base 4: mod_base = OTHER; note = 2'-O-methyluridine-3'-phosphorothioate
  modified_base 5: mod_base = OTHER; note = 2'-O-methylguanosine-3'-phosphorothioate
  modified_base 6: mod_base = OTHER; note = 5'-methyl-deoxycytidine-3'-phosphorothioate
  modified_base 7: mod_base = OTHER; note = 2'-deoxythymidine-3'-phosphorothioate
  modified_base 8: mod_base = OTHER; note = 2'-deoxythymidine-3'-phosphorothioate
  modified_base 9: mod_base = OTHER; note = 5'-methyl-deoxycytidine-3'-phosphorothioate
  modified_base 10: mod_base = OTHER; note = 2'-deoxythymidine-3'-phosphorothioate
  modified_base 11: mod_base = OTHER; note = 2'-deoxythymidine-3'-phosphorothioate
  modified_base 12: mod_base = OTHER; note = 2'-deoxythymidine-3'-phosphorothioate
  modified_base 13: mod_base = OTHER; note = 2'-deoxyguanosine-3'-phosphorothioate
  modified_base 14: mod_base = OTHER; note = 2'-deoxyadenosine-3'-phosphorothioate
  modified_base 15: mod_base = OTHER; note = 2'-deoxyguanosine-3'-phosphorothioate
  modified_base 16: mod_base = OTHER; note = 2'-O-methyluridine-3'-phosphorothioate
  modified_base 17: mod_base = OTHER; note = 2'-O-methyluridine-3'-phosphorothioate
  modified_base 18: mod_base = OTHER; note = 2'-O-methyluridine-3'-phosphorothioate
  modified_base 19: mod_base = OTHER; note = 2'-O-methylguanosine-3'-phosphorothioate
  modified_base 20: mod_base = OTHER; note = 2'-O-methyluridine
  misc_feature 1..5: note = RNA
  misc_feature 16..20: note = RNA
  misc_feature 6..15: note = DNA
ctttgcttctttgagtttgt

SEQ ID NO: 372 - DNA, 20 bp, synthetic construct
  source 1..20: mol_type = other DNA
  modified_base 1: mod_base = OTHER; note = 2'-O-methyladenosine-3'-phosphorothioate
  modified_base 2: mod_base = OTHER; note = 2'-O-methyladenosine-3'-phosphorothioate
  modified_base 3: mod_base = OTHER; note = 2'-O-methyluridine-3'-phosphorothioate
  modified_base 4: mod_base = OTHER; note = 2'-O-methylguanosine-3'-phosphorothioate
  modified_base 5: mod_base = OTHER; note = 2'-O-methyluridine-3'-phosphorothioate
  modified_base 6: mod_base = OTHER; note = 2'-deoxyguanosine-3'-phosphorothioate
  modified_base 7: mod_base = OTHER; note = 2'-deoxythymidine-3'-phosphorothioate
  modified_base 8: mod_base = OTHER; note = 2'-deoxyadenosine-3'-phosphorothioate
  modified_base 9: mod_base = OTHER; note = 2'-deoxythymidine-3'-phosphorothioate
  modified_base 10: mod_base = OTHER; note = 5'-methyl-deoxycytidine-3'-phosphorothioate
  modified_base 11: mod_base = OTHER; note = 2'-deoxyadenosine-3'-phosphorothioate
  modified_base 12: mod_base = OTHER; note = 5'-methyl-deoxycytidine-3'-phosphorothioate
  modified_base 13: mod_base = OTHER; note = 2'-deoxythymidine-3'-phosphorothioate
  modified_base 14: mod_base = OTHER; note = 2'-deoxythymidine-3'-phosphorothioate
  modified_base 15: mod_base = OTHER; note = 2'-deoxythymidine-3'-phosphorothioate
  modified_base 16: mod_base = OTHER; note = 2'-O-methylguanosine-3'-phosphorothioate
  modified_base 17: mod_base = OTHER; note = 2'-O-methylcytidine-3'-phosphorothioate
  modified_base 18: mod_base = OTHER; note = 2'-O-methyluridine-3'-phosphorothioate
  modified_base 19: mod_base = OTHER; note = 2'-O-methyluridine-3'-phosphorothioate
  modified_base 20: mod_base = OTHER; note = 2'-O-methylcytidine
  misc_feature 1..5: note = RNA
  misc_feature 16..20: note = RNA
  misc_feature 6..15: note = DNA
aatgtgtatcactttgcttc

SEQ ID NO: 373 - DNA, 20 bp, synthetic construct
  source 1..20: mol_type = other DNA
  modified_base 1: mod_base = OTHER; note = 2'-O-methylcytidine-3'-phosphorothioate
  modified_base 2: mod_base = OTHER; note = 2'-O-methylguanosine-3'-phosphorothioate
  modified_base 3: mod_base = OTHER; note = 2'-O-methyluridine-3'-phosphorothioate
  modified_base 4: mod_base = OTHER; note = 2'-O-methylcytidine-3'-phosphorothioate
  modified_base 5: mod_base = OTHER; note = 2'-O-methyluridine-3'-phosphorothioate
  modified_base 6: mod_base = OTHER; note = 5'-methyl-deoxycytidine-3'-phosphorothioate
  modified_base 7: mod_base = OTHER; note = 5'-methyl-deoxycytidine-3'-phosphorothioate
  modified_base 8: mod_base = OTHER; note = 2'-deoxythymidine-3'-phosphorothioate
  modified_base 9: mod_base = OTHER; note = 5'-methyl-deoxycytidine-3'-phosphorothioate
  modified_base 10: mod_base = OTHER; note = 5'-methyl-deoxycytidine-3'-phosphorothioate
  modified_base 11: mod_base = OTHER; note = 2'-deoxyadenosine-3'-phosphorothioate
  modified_base 12: mod_base = OTHER; note = 2'-deoxyadenosine-3'-phosphorothioate
  modified_base 13: mod_base = OTHER; note = 2'-deoxyadenosine-3'-phosphorothioate
  modified_base 14: mod_base = OTHER; note = 2'-deoxythymidine-3'-phosphorothioate
  modified_base 15: mod_base = OTHER; note = 2'-deoxyguanosine-3'-phosphorothioate
  modified_base 16: mod_base = OTHER; note = 2'-O-methyluridine-3'-phosphorothioate
  modified_base 17: mod_base = OTHER; note = 2'-O-methylguanosine-3'-phosphorothioate
  modified_base 18: mod_base = OTHER; note = 2'-O-methyluridine-3'-phosphorothioate
  modified_base 19: mod_base = OTHER; note = 2'-O-methyladenosine-3'-phosphorothioate
  modified_base 20: mod_base = OTHER; note = 2'-O-methyluridine
  misc_feature 1..5: note = RNA
  misc_feature 16..20: note = RNA
  misc_feature 6..15: note = DNA
cgtctcctccaaatgtgtat

SEQ ID NO: 374 - DNA, 20 bp, synthetic construct
  source 1..20: mol_type = other DNA
  modified_base 1: mod_base = OTHER; note = 2'-O-methyladenosine-3'-phosphorothioate
  modified_base 2: mod_base = OTHER; note = 2'-O-methyluridine-3'-phosphorothioate
  modified_base 3: mod_base = OTHER; note = 2'-O-methylguanosine-3'-phosphorothioate
  modified_base 4: mod_base = OTHER; note = 2'-O-methylcytidine-3'-phosphorothioate
  modified_base 5: mod_base = OTHER; note = 2'-O-methyluridine-3'-phosphorothioate
  modified_base 6: mod_base = OTHER; note = 2'-deoxyguanosine-3'-phosphorothioate
  modified_base 7: mod_base = OTHER; note = 2'-deoxyguanosine-3'-phosphorothioate
  modified_base 8: mod_base = OTHER; note = 2'-deoxyadenosine-3'-phosphorothioate
  modified_base 9: mod_base = OTHER; note = 2'-deoxythymidine-3'-phosphorothioate
  modified_base 10: mod_base = OTHER; note = 2'-deoxythymidine-3'-phosphorothioate
  modified_base 11: mod_base = OTHER; note = 2'-deoxyadenosine-3'-phosphorothioate
  modified_base 12: mod_base = OTHER; note = 5'-methyl-deoxycytidine-3'-phosphorothioate
  modified_base 13: mod_base = OTHER; note = 2'-deoxyguanosine-3'-phosphorothioate
  modified_base 14: mod_base = OTHER; note = 2'-deoxythymidine-3'-phosphorothioate
  modified_base 15: mod_base = OTHER; note = 5'-methyl-deoxycytidine-3'-phosphorothioate
  modified_base 16: mod_base = OTHER; note = 2'-O-methyluridine-3'-phosphorothioate
  modified_base 17: mod_base = OTHER; note = 2'-O-methylcytidine-3'-phosphorothioate
  modified_base 18: mod_base = OTHER; note = 2'-O-methylcytidine-3'-phosphorothioate
  modified_base 19: mod_base = OTHER; note = 2'-O-methyluridine-3'-phosphorothioate
  modified_base 20: mod_base = OTHER; note = 2'-O-methylcytidine
  misc_feature 1..5: note = RNA
  misc_feature 16..20: note = RNA
  misc_feature 6..15: note = DNA
atgctggattacgtctcctc

SEQ ID NO: 375 - DNA, 20 bp, synthetic construct
  source 1..20: mol_type = other DNA
  modified_base 1: mod_base = OTHER; note = 2'-O-methyladenosine-3'-phosphorothioate
  modified_base 2: mod_base = OTHER; note = 2'-O-methylguanosine-3'-phosphorothioate
  modified_base 3: mod_base = OTHER; note = 2'-O-methyladenosine-3'-phosphorothioate
  modified_base 4: mod_base = OTHER; note = 2'-O-methyladenosine-3'-phosphorothioate
  modified_base 5: mod_base = OTHER; note = 2'-O-methylguanosine-3'-phosphorothioate
  modified_base 6: mod_base = OTHER; note = 2'-deoxythymidine-3'-phosphorothioate
  modified_base 7: mod_base = OTHER; note = 2'-deoxythymidine-3'-phosphorothioate
  modified_base 8: mod_base = OTHER; note = 5'-methyl-deoxycytidine-3'-phosphorothioate
  modified_base 9: mod_base = OTHER; note = 5'-methyl-deoxycytidine-3'-phosphorothioate
  modified_base 10: mod_base = OTHER; note = 2'-deoxyadenosine-3'-phosphorothioate
  modified_base 11: mod_base = OTHER; note = 2'-deoxyadenosine-3'-phosphorothioate
  modified_base 12: mod_base = OTHER; note = 2'-deoxythymidine-3'-phosphorothioate
  modified_base 13: mod_base = OTHER; note = 2'-deoxyguanosine-3'-phosphorothioate
  modified_base 14: mod_base = OTHER; note = 5'-methyl-deoxycytidine-3'-phosphorothioate
  modified_base 15: mod_base = OTHER; note = 2'-deoxythymidine-3'-phosphorothioate
  modified_base 16: mod_base = OTHER; note = 2'-O-methylguanosine-3'-phosphorothioate
  modified_base 17: mod_base = OTHER; note = 2'-O-methylguanosine-3'-phosphorothioate
  modified_base 18: mod_base = OTHER; note = 2'-O-methyladenosine-3'-phosphorothioate
  modified_base 19: mod_base = OTHER; note = 2'-O-methyluridine-3'-phosphorothioate
  modified_base 20: mod_base = OTHER; note = 2'-O-methyluridine
  misc_feature 1..5: note = RNA
  misc_feature 16..20: note = RNA
  misc_feature 6..15: note = DNA
agaagttccaatgctggatt

SEQ ID NO: 376 - DNA, 20 bp, synthetic construct
  source 1..20: mol_type = other DNA
  modified_base 1: mod_base = OTHER; note = 2'-O-methyluridine-3'-phosphorothioate
  modified_base 2: mod_base = OTHER; note = 2'-O-methylguanosine-3'-phosphorothioate
  modified_base 3: mod_base = OTHER; note = 2'-O-methylcytidine-3'-phosphorothioate
  modified_base 4: mod_base = OTHER; note = 2'-O-methyluridine-3'-phosphorothioate
  modified_base 5: mod_base = OTHER; note = 2'-O-methyluridine-3'-phosphorothioate
  modified_base 6: mod_base = OTHER; note = 2'-deoxyguanosine-3'-phosphorothioate
  modified_base 7: mod_base = OTHER; note = 2'-deoxyadenosine-3'-phosphorothioate
  modified_base 8: mod_base = OTHER; note = 2'-deoxyadenosine-3'-phosphorothioate
  modified_base 9: mod_base = OTHER; note = 2'-deoxyguanosine-3'-phosphorothioate
  modified_base 10: mod_base = OTHER; note = 2'-deoxyadenosine-3'-phosphorothioate
  modified_base 11: mod_base = OTHER; note = 2'-deoxythymidine-3'-phosphorothioate
  modified_base 12: mod_base = OTHER; note = 5'-methyl-deoxycytidine-3'-phosphorothioate
  modified_base 13: mod_base = OTHER; note = 2'-deoxyadenosine-3'-phosphorothioate
  modified_base 14: mod_base = OTHER; note = 2'-deoxyguanosine-3'-phosphorothioate
  modified_base 15: mod_base = OTHER; note = 2'-deoxyadenosine-3'-phosphorothioate
  modified_base 16: mod_base = OTHER; note = 2'-O-methyladenosine-3'-phosphorothioate
  modified_base 17: mod_base = OTHER; note = 2'-O-methylguanosine-3'-phosphorothioate
  modified_base 18: mod_base = OTHER; note = 2'-O-methyluridine-3'-phosphorothioate
  modified_base 19: mod_base = OTHER; note = 2'-O-methyluridine-3'-phosphorothioate
  modified_base 20: mod_base = OTHER; note = 2'-O-methylcytidine
  misc_feature 1..5: note = RNA
  misc_feature 16..20: note = RNA
  misc_feature 6..15: note = DNA
tgcttgaagatcagaagttc

SEQ ID NO: 377 - DNA, 20 bp, synthetic construct
  source 1..20: mol_type = other DNA
  modified_base 1: mod_base = OTHER; note = 2'-O-methyluridine-3'-phosphorothioate
  modified_base 2: mod_base = OTHER; note = 2'-O-methylguanosine-3'-phosphorothioate
  modified_base 3: mod_base = OTHER; note = 2'-O-methyladenosine-3'-phosphorothioate
  modified_base 4: mod_base = OTHER; note = 2'-O-methylguanosine-3'-phosphorothioate
  modified_base 5: mod_base = OTHER; note = 2'-O-methyladenosine-3'-phosphorothioate
  modified_base 6: mod_base = OTHER; note = 2'-deoxyadenosine-3'-phosphorothioate
  modified_base 7: mod_base = OTHER; note = 2'-deoxythymidine-3'-phosphorothioate
  modified_base 8: mod_base = OTHER; note = 5'-methyl-deoxycytidine-3'-phosphorothioate
  modified_base 9: mod_base = OTHER; note = 5'-methyl-deoxycytidine-3'-phosphorothioate
  modified_base 10: mod_base = OTHER; note = 5'-methyl-deoxycytidine-3'-phosphorothioate
  modified_base 11: mod_base = OTHER; note = 2'-deoxythymidine-3'-phosphorothioate
  modified_base 12: mod_base = OTHER; note = 2'-deoxyguanosine-3'-phosphorothioate
  modified_base 13: mod_base = OTHER; note = 5'-methyl-deoxycytidine-3'-phosphorothioate
  modified_base 14: mod_base = OTHER; note = 2'-deoxythymidine-3'-phosphorothioate
  modified_base 15: mod_base = OTHER; note = 2'-deoxythymidine-3'-phosphorothioate
  modified_base 16: mod_base = OTHER; note = 2'-O-methylguanosine-3'-phosphorothioate
  modified_base 17: mod_base = OTHER; note = 2'-O-methyladenosine-3'-phosphorothioate
  modified_base 18: mod_base = OTHER; note = 2'-O-methyladenosine-3'-phosphorothioate
  modified_base 19: mod_base = OTHER; note = 2'-O-methylguanosine-3'-phosphorothioate
  modified_base 20: mod_base = OTHER; note = 2'-O-methyladenosine
  misc_feature 1..5: note = RNA
  misc_feature 16..20: note = RNA
  misc_feature 6..15: note = DNA
tgagaatccctgcttgaaga

SEQ ID NO: 378 - DNA, 20 bp, synthetic construct
  source 1..20: mol_type = other DNA
  modified_base 1: mod_base = OTHER; note = 2'-O-methyladenosine-3'-phosphorothioate
  modified_base 2: mod_base = OTHER; note = 2'-O-methyladenosine-3'-phosphorothioate
  modified_base 3: mod_base = OTHER; note = 2'-O-methylcytidine-3'-phosphorothioate
  modified_base 4: mod_base = OTHER; note = 2'-O-methylcytidine-3'-phosphorothioate
  modified_base 5: mod_base = OTHER; note = 2'-O-methyladenosine-3'-phosphorothioate
  modified_base 6: mod_base = OTHER; note = 5'-methyl-deoxycytidine-3'-phosphorothioate
  modified_base 7: mod_base = OTHER; note = 2'-deoxyadenosine-3'-phosphorothioate
  modified_base 8: mod_base = OTHER; note = 2'-deoxyguanosine-3'-phosphorothioate
  modified_base 9: mod_base = OTHER; note = 2'-deoxyguanosine-3'-phosphorothioate
  modified_base 10: mod_base = OTHER; note = 2'-deoxythymidine-3'-phosphorothioate
  modified_base 11: mod_base = OTHER; note = 2'-deoxythymidine-3'-phosphorothioate
  modified_base 12: mod_base = OTHER; note = 2'-deoxyguanosine-3'-phosphorothioate
  modified_base 13: mod_base = OTHER; note = 2'-deoxyadenosine-3'-phosphorothioate
  modified_base 14: mod_base = OTHER; note = 2'-deoxyguanosine-3'-phosphorothioate
  modified_base 15: mod_base = OTHER; note = 2'-deoxyadenosine-3'-phosphorothioate
  modified_base 16: mod_base = OTHER; note = 2'-O-methyladenosine-3'-phosphorothioate
  modified_base 17: mod_base = OTHER; note = 2'-O-methyluridine-3'-phosphorothioate
  modified_base 18: mod_base = OTHER; note = 2'-O-methylcytidine-3'-phosphorothioate
  modified_base 19: mod_base = OTHER; note = 2'-O-methylcytidine-3'-phosphorothioate
  modified_base 20: mod_base = OTHER; note = 2'-O-methylcytidine
  misc_feature 1..5: note = RNA
  misc_feature 16..20: note = RNA
  misc_feature 6..15: note = DNA
aaccacaggttgagaatccc

SEQ ID NO: 379 - DNA, 20 bp, synthetic construct
  source 1..20: mol_type = other DNA
  modified_base 1: mod_base = OTHER; note = 2'-O-methyladenosine-3'-phosphorothioate
  modified_base 2: mod_base = OTHER; note = 2'-O-methyluridine-3'-phosphorothioate
  modified_base 3: mod_base = OTHER; note = 2'-O-methylguanosine-3'-phosphorothioate
  modified_base 4: mod_base = OTHER; note = 2'-O-methyladenosine-3'-phosphorothioate
  modified_base 5: mod_base = OTHER; note = 2'-O-methyladenosine-3'-phosphorothioate
  modified_base 6: mod_base = OTHER; note = 5'-methyl-deoxycytidine-3'-phosphorothioate
  modified_base 7: mod_base = OTHER; note = 5'-methyl-deoxycytidine-3'-phosphorothioate
  modified_base 8: mod_base = OTHER; note = 5'-methyl-deoxycytidine-3'-phosphorothioate
  modified_base 9: mod_base = OTHER; note = 5'-methyl-deoxycytidine-3'-phosphorothioate
  modified_base 10: mod_base = OTHER; note = 2'-deoxythymidine-3'-phosphorothioate
  modified_base 11: mod_base = OTHER; note = 2'-deoxyadenosine-3'-phosphorothioate
  modified_base 12: mod_base = OTHER; note = 2'-deoxyadenosine-3'-phosphorothioate
  modified_base 13: mod_base = OTHER; note = 2'-deoxyadenosine-3'-phosphorothioate
  modified_base 14: mod_base = OTHER; note = 5'-methyl-deoxycytidine-3'-phosphorothioate
  modified_base 15: mod_base = OTHER; note = 5'-methyl-deoxycytidine-3'-phosphorothioate
  modified_base 16: mod_base = OTHER; note = 2'-O-methyladenosine-3'-phosphorothioate
  modified_base 17: mod_base = OTHER; note = 2'-O-methylcytidine-3'-phosphorothioate
  modified_base 18: mod_base = OTHER; note = 2'-O-methyladenosine-3'-phosphorothioate
  modified_base 19: mod_base = OTHER; note = 2'-O-methylguanosine-3'-phosphorothioate
  modified_base 20: mod_base = OTHER; note = 2'-O-methylguanosine
  misc_feature 1..5: note = RNA
  misc_feature 16..20: note = RNA
  misc_feature 6..15: note = DNA
atgaacccctaaaccacagg

SEQ ID NO: 380 - DNA, 20 bp, synthetic construct
  source 1..20: mol_type = other DNA
  modified_base 1: mod_base = OTHER; note = 2'-O-methyladenosine-3'-phosphorothioate
  modified_base 2: mod_base = OTHER; note = 2'-O-methylcytidine-3'-phosphorothioate
  modified_base 3: mod_base = OTHER; note = 2'-O-methylguanosine-3'-phosphorothioate
  modified_base 4: mod_base = OTHER; note = 2'-O-methylcytidine-3'-phosphorothioate
  modified_base 5: mod_base = OTHER; note = 2'-O-methyluridine-3'-phosphorothioate
  modified_base 6: mod_base = OTHER; note = 5'-methyl-deoxycytidine-3'-phosphorothioate
  modified_base 7: mod_base = OTHER; note = 2'-deoxyadenosine-3'-phosphorothioate
  modified_base 8: mod_base = OTHER; note = 2'-deoxyguanosine-3'-phosphorothioate
  modified_base 9: mod_base = OTHER; note = 5'-methyl-deoxycytidine-3'-phosphorothioate
  modified_base 10: mod_base = OTHER; note = 5'-methyl-deoxycytidine-3'-phosphorothioate
  modified_base 11: mod_base = OTHER; note = 5'-methyl-deoxycytidine-3'-phosphorothioate
  modified_base 12: mod_base = OTHER; note = 5'-methyl-deoxycytidine-3'-phosphorothioate
  modified_base 13: mod_base = OTHER; note = 2'-deoxyguanosine-3'-phosphorothioate
  modified_base 14: mod_base = OTHER; note = 2'-deoxyadenosine-3'-phosphorothioate
  modified_base 15: mod_base = OTHER; note = 2'-deoxythymidine-3'-phosphorothioate
  modified_base 16: mod_base = OTHER; note = 2'-O-methylguanosine-3'-phosphorothioate
  modified_base 17: mod_base = OTHER; note = 2'-O-methyladenosine-3'-phosphorothioate
  modified_base 18: mod_base = OTHER; note = 2'-O-methyladenosine-3'-phosphorothioate
  modified_base 19: mod_base = OTHER; note = 2'-O-methylcytidine-3'-phosphorothioate
  modified_base 20: mod_base = OTHER; note = 2'-O-methylcytidine
  misc_feature 1..5: note = RNA
  misc_feature 16..20: note = RNA
  misc_feature 6..15: note = DNA
acgctcagccccgatgaacc

SEQ ID NO: 381 - DNA, 20 bp, synthetic construct
  source 1..20: mol_type = other DNA
  modified_base 1: mod_base = OTHER; note = 2'-O-methyluridine-3'-phosphorothioate
  modified_base 2: mod_base = OTHER; note = 2'-O-methyluridine-3'-phosphorothioate
  modified_base 3: mod_base = OTHER; note = 2'-O-methylcytidine-3'-phosphorothioate
  modified_base 4: mod_base = OTHER; note = 2'-O-methylcytidine-3'-phosphorothioate
  modified_base 5: mod_base = OTHER; note = 2'-O-methyluridine-3'-phosphorothioate
  modified_base 6: mod_base = OTHER; note = 5'-methyl-deoxycytidine-3'-phosphorothioate
  modified_base 7: mod_base = OTHER; note = 2'-deoxythymidine-3'-phosphorothioate
  modified_base 8: mod_base = OTHER; note = 2'-deoxythymidine-3'-phosphorothioate
  modified_base 9: mod_base = OTHER; note = 2'-deoxyguanosine-3'-phosphorothioate
  modified_base 10: mod_base = OTHER; note = 2'-deoxythymidine-3'-phosphorothioate
  modified_base 11: mod_base = OTHER; note = 5'-methyl-deoxycytidine-3'-phosphorothioate
  modified_base 12: mod_base = OTHER; note = 2'-deoxyadenosine-3'-phosphorothioate
  modified_base 13: mod_base = OTHER; note = 5'-methyl-deoxycytidine-3'-phosphorothioate
  modified_base 14: mod_base = OTHER; note = 2'-deoxyguanosine-3'-phosphorothioate
  modified_base 15: mod_base = OTHER; note = 5'-methyl-deoxycytidine-3'-phosphorothioate
  modified_base 16: mod_base = OTHER; note = 2'-O-methyluridine-3'-phosphorothioate
  modified_base 17: mod_base = OTHER; note = 2'-O-methylcytidine-3'-phosphorothioate
  modified_base 18: mod_base = OTHER; note = 2'-O-methyladenosine-3'-phosphorothioate
  modified_base 19: mod_base = OTHER; note = 2'-O-methylguanosine-3'-phosphorothioate
  modified_base 20: mod_base = OTHER; note = 2'-O-methylcytidine
  misc_feature 1..5: note = RNA
  misc_feature 16..20: note = RNA
  misc_feature 6..15: note = DNA
ttcctcttgtcacgctcagc

SEQ ID NO: 382 - DNA, 20 bp, synthetic construct
  source 1..20: mol_type = other DNA
  modified_base 1: mod_base = OTHER; note = 2'-O-methylguanosine-3'-phosphorothioate
  modified_base 2: mod_base = OTHER; note = 2'-O-methylguanosine-3'-phosphorothioate
  modified_base 3: mod_base = OTHER; note = 2'-O-methylcytidine-3'-phosphorothioate
  modified_base 4: mod_base = OTHER; note = 2'-O-methylcytidine-3'-phosphorothioate
  modified_base 5: mod_base = OTHER; note = 2'-O-methylcytidine-3'-phosphorothioate
  modified_base 6: mod_base = OTHER; note = 2'-deoxyadenosine-3'-phosphorothioate
  modified_base 7: mod_base = OTHER; note = 2'-deoxythymidine-3'-phosphorothioate
  modified_base 8: mod_base = OTHER; note = 2'-deoxythymidine-3'-phosphorothioate
  modified_base 9: mod_base = OTHER; note = 5'-methyl-deoxycytidine-3'-phosphorothioate
  modified_base 10: mod_base = OTHER; note = 5'-methyl-deoxycytidine-3'-phosphorothioate
  modified_base 11: mod_base = OTHER; note = 2'-deoxythymidine-3'-phosphorothioate
  modified_base 12: mod_base = OTHER; note = 2'-deoxythymidine-3'-phosphorothioate
  modified_base 13: mod_base = OTHER; note = 5'-methyl-deoxycytidine-3'-phosphorothioate
  modified_base 14: mod_base = OTHER; note = 5'-methyl-deoxycytidine-3'-phosphorothioate
  modified_base 15: mod_base = OTHER; note = 2'-deoxythymidine-3'-phosphorothioate
  modified_base 16: mod_base = OTHER; note = 2'-O-methylcytidine-3'-phosphorothioate
  modified_base 17: mod_base = OTHER; note = 2'-O-methyluridine-3'-phosphorothioate
  modified_base 18: mod_base = OTHER; note = 2'-O-methyluridine-3'-phosphorothioate
  modified_base 19: mod_base = OTHER; note = 2'-O-methylguanosine-3'-phosphorothioate
  modified_base 20: mod_base = OTHER; note = 2'-O-methyluridine
  misc_feature 1..5: note = RNA
  misc_feature 16..20: note = RNA
  misc_feature 6..15: note = DNA
ggcccattccttcctcttgt

SEQ ID NO: 383 - DNA, 20 bp, synthetic construct
  source 1..20: mol_type = other DNA
  modified_base 1: mod_base = OTHER; note = 2'-O-methyluridine-3'-phosphorothioate
  modified_base 2: mod_base = OTHER; note = 2'-O-methylguanosine-3'-phosphorothioate
  modified_base 3: mod_base = OTHER; note = 2'-O-methylcytidine-3'-phosphorothioate
  modified_base 4: mod_base = OTHER; note = 2'-O-methyladenosine-3'-phosphorothioate
  modified_base 5: mod_base = OTHER; note = 2'-O-methyluridine-3'-phosphorothioate
  modified_base 6: mod_base = OTHER; note = 5'-methyl-deoxycytidine-3'-phosphorothioate
  modified_base 7: mod_base = OTHER; note = 5'-methyl-deoxycytidine-3'-phosphorothioate
  modified_base 8: mod_base = OTHER; note = 5'-methyl-deoxycytidine-3'-phosphorothioate
  modified_base 9: mod_base = OTHER; note = 2'-deoxyadenosine-3'-phosphorothioate
  modified_base 10: mod_base = OTHER; note = 5'-methyl-deoxycytidine-3'-phosphorothioate
  modified_base 11: mod_base = OTHER; note = 2'-deoxyguanosine-3'-phosphorothioate
  modified_base 12: mod_base = OTHER; note = 2'-deoxyguanosine-3'-phosphorothioate
  modified_base 13: mod_base = OTHER; note = 2'-deoxyguanosine-3'-phosphorothioate
  modified_base 14: mod_base = OTHER; note = 5'-methyl-deoxycytidine-3'-phosphorothioate
  modified_base 15: mod_base = OTHER; note = 5'-methyl-deoxycytidine-3'-phosphorothioate
  modified_base 16: mod_base = OTHER; note = 2'-O-methylcytidine-3'-phosphorothioate
  modified_base 17: mod_base = OTHER; note = 2'-O-methyladenosine-3'-phosphorothioate
  modified_base 18: mod_base = OTHER; note = 2'-O-methyluridine-3'-phosphorothioate
  modified_base 19: mod_base = OTHER; note = 2'-O-methyluridine-3'-phosphorothioate
  modified_base 20: mod_base = OTHER; note = 2'-O-methylcytidine
  misc_feature 1..5: note = RNA
  misc_feature 16..20: note = RNA
  misc_feature 6..15: note = DNA
tgcatcccacgggcccattc

SEQ ID NO: 384 - DNA, 20 bp, synthetic construct
  source 1..20: mol_type = other DNA
  modified_base 1: mod_base = OTHER; note = 2'-O-methylcytidine-3'-phosphorothioate
  modified_base 2: mod_base = OTHER; note = 2'-O-methylcytidine-3'-phosphorothioate
  modified_base 3: mod_base = OTHER; note = 2'-O-methyladenosine-3'-phosphorothioate
  modified_base 4: mod_base = OTHER; note = 2'-O-methylcytidine-3'-phosphorothioate
  modified_base 5: mod_base = OTHER; note = 2'-O-methyladenosine-3'-phosphorothioate
  modified_base 6: mod_base = OTHER; note = 2'-deoxythymidine-3'-phosphorothioate
  modified_base 7: mod_base = OTHER; note = 2'-deoxythymidine-3'-phosphorothioate
  modified_base 8: mod_base = OTHER; note = 2'-deoxyguanosine-3'-phosphorothioate
  modified_base 9: mod_base = OTHER; note = 5'-methyl-deoxycytidine-3'-phosphorothioate
  modified_base 10: mod_base = OTHER; note = 5'-methyl-deoxycytidine-3'-phosphorothioate
  modified_base 11: mod_base = OTHER; note = 2'-deoxythymidine-3'-phosphorothioate
  modified_base 12: mod_base = OTHER; note = 2'-deoxyguanosine-3'-phosphorothioate
  modified_base 13: mod_base = OTHER; note = 5'-methyl-deoxycytidine-3'-phosphorothioate
  modified_base 14: mod_base = OTHER; note = 2'-deoxyadenosine-3'-phosphorothioate
  modified_base 15: mod_base = OTHER; note = 2'-deoxythymidine-3'-phosphorothioate
  modified_base 16: mod_base = OTHER; note = 2'-O-methylcytidine-3'-phosphorothioate
  modified_base 17: mod_base = OTHER; note = 2'-O-methylcytidine-3'-phosphorothioate
  modified_base 18: mod_base = OTHER; note = 2'-O-methylcytidine-3'-phosphorothioate
  modified_base 19: mod_base = OTHER; note = 2'-O-methyladenosine-3'-phosphorothioate
  modified_base 20: mod_base = OTHER; note = 2'-O-methylcytidine
  misc_feature 1..5: note = RNA
  misc_feature 16..20: note = RNA
  misc_feature 6..15: note = DNA
ccacattgcctgcatcccac

SEQ ID NO: 385 - DNA, 20 bp, synthetic construct
  source 1..20: mol_type = other DNA
  modified_base 1: mod_base = OTHER; note = 2'-O-methylguanosine-3'-phosphorothioate
  modified_base 2: mod_base = OTHER; note = 2'-O-methylcytidine-3'-phosphorothioate
  modified_base 3: mod_base = OTHER; note = 2'-O-methylcytidine-3'-phosphorothioate
  modified_base 4: mod_base = OTHER; note = 2'-O-methyluridine-3'-phosphorothioate
  modified_base 5: mod_base = OTHER; note = 2'-O-methyluridine-3'-phosphorothioate
  modified_base 6: mod_base = OTHER; note = 2'-deoxythymidine-3'-phosphorothioate
  modified_base 7: mod_base = OTHER; note = 2'-deoxythymidine-3'-phosphorothioate
  modified_base 8: mod_base = OTHER; note = 2'-deoxyadenosine-3'-phosphorothioate
  modified_base 9: mod_base = OTHER; note = 2'-deoxyadenosine-3'-phosphorothioate
  modified_base 10: mod_base = OTHER; note = 2'-deoxyguanosine-3'-phosphorothioate
  modified_base 11: mod_base = OTHER; note = 2'-deoxythymidine-3'-phosphorothioate
  modified_base 12: mod_base = OTHER; note = 5'-methyl-deoxycytidine-3'-phosphorothioate
  modified_base 13: mod_base = OTHER; note = 5'-methyl-deoxycytidine-3'-phosphorothioate
  modified_base 14: mod_base = OTHER; note = 5'-methyl-deoxycytidine-3'-phosphorothioate
  modified_base 15: mod_base = OTHER; note = 2'-deoxyadenosine-3'-phosphorothioate
  modified_base 16: mod_base = OTHER; note = 2'-O-methylcytidine-3'-phosphorothioate
  modified_base 17: mod_base = OTHER; note = 2'-O-methyladenosine-3'-phosphorothioate
  modified_base 18: mod_base = OTHER; note = 2'-O-methyluridine-3'-phosphorothioate
  modified_base 19: mod_base = OTHER; note = 2'-O-methyluridine-3'-phosphorothioate
  modified_base 20: mod_base = OTHER; note = 2'-O-methylguanosine
  misc_feature 1..5: note = RNA
  misc_feature 16..20: note = RNA
  misc_feature 6..15: note = DNA
gccttttaagtcccacattg

SEQ ID NO: 386 - DNA, 20 bp, synthetic construct
  source 1..20: mol_type = other DNA
  modified_base 1: mod_base = OTHER; note = 2'-O-methylcytidine-3'-phosphorothioate
  modified_base 2: mod_base = OTHER; note = 2'-O-methyladenosine-3'-phosphorothioate
  modified_base 3: mod_base = OTHER; note = 2'-O-methylguanosine-3'-phosphorothioate
  modified_base 4: mod_base = OTHER; note = 2'-O-methyluridine-3'-phosphorothioate
  modified_base 5: mod_base = OTHER; note = 2'-O-methylguanosine-3'-phosphorothioate
  modified_base 6: mod_base = OTHER; note = 5'-methyl-deoxycytidine-3'-phosphorothioate
  modified_base 7: mod_base = OTHER; note = 2'-deoxythymidine-3'-phosphorothioate
  modified_base 8: mod_base = OTHER; note = 2'-deoxythymidine-3'-phosphorothioate
  modified_base 9: mod_base = OTHER; note = 2'-deoxyguanosine-3'-phosphorothioate
  modified_base 10: mod_base = OTHER; note = 2'-deoxyguanosine-3'-phosphorothioate
  modified_base 11: mod_base = OTHER; note = 2'-deoxyguanosine-3'-phosphorothioate
  modified_base 12: mod_base = OTHER; note = 5'-methyl-deoxycytidine-3'-phosphorothioate
  modified_base 13: mod_base = OTHER; note = 5'-methyl-deoxycytidine-3'-phosphorothioate
  modified_base 14: mod_base = OTHER; note = 2'-deoxythymidine-3'-phosphorothioate
  modified_base 15: mod_base = OTHER; note = 2'-deoxythymidine-3'-phosphorothioate
  modified_base 16: mod_base = OTHER; note = 2'-O-methyluridine-3'-phosphorothioate
  modified_base 17: mod_base = OTHER; note = 2'-O-methyluridine-3'-phosphorothioate
  modified_base 18: mod_base = OTHER; note = 2'-O-methyladenosine-3'-phosphorothioate
  modified_base 19: mod_base = OTHER; note = 2'-O-methyladenosine-3'-phosphorothioate
  modified_base 20: mod_base = OTHER; note = 2'-O-methylguanosine
  misc_feature 1..5: note = RNA
  misc_feature 16..20: note = RNA
  misc_feature 6..15: note = DNA
cagtgcttgggccttttaag

SEQ ID NO: 387 - DNA, 20 bp, synthetic construct
  source 1..20: mol_type = other DNA
  modified_base 1: mod_base = OTHER; note = 2'-O-methylguanosine-3'-phosphorothioate
  modified_base 2: mod_base = OTHER; note = 2'-O-methylguanosine-3'-phosphorothioate
  modified_base 3: mod_base = OTHER; note = 2'-O-methyluridine-3'-phosphorothioate
  modified_base 4: mod_base = OTHER; note = 2'-O-methyluridine-3'-phosphorothioate
  modified_base 5: mod_base = OTHER; note = 2'-O-methylcytidine-3'-phosphorothioate
  modified_base 6: mod_base = OTHER; note = 5'-methyl-deoxycytidine-3'-phosphorothioate
  modified_base 7: mod_base = OTHER; note = 2'-deoxyadenosine-3'-phosphorothioate
  modified_base 8: mod_base = OTHER; note = 2'-deoxythymidine-3'-phosphorothioate
  modified_base 9: mod_base = OTHER; note = 2'-deoxythymidine-3'-phosphorothioate
  modified_base 10: mod_base = OTHER; note = 2'-deoxythymidine-3'-phosphorothioate
  modified_base 11: mod_base = OTHER; note = 2'-deoxythymidine-3'-phosphorothioate
  modified_base 12: mod_base = OTHER; note = 5'-methyl-deoxycytidine-3'-phosphorothioate
  modified_base 13: mod_base = OTHER; note = 2'-deoxyadenosine-3'-phosphorothioate
  modified_base 14: mod_base = OTHER; note = 2'-deoxyguanosine-3'-phosphorothioate
  modified_base 15: mod_base = OTHER; note = 2'-deoxythymidine-3'-phosphorothioate
  modified_base 16: mod_base = OTHER; note = 2'-O-methylguanosine-3'-phosphorothioate
  modified_base 17: mod_base = OTHER; note = 2'-O-methylcytidine-3'-phosphorothioate
  modified_base 18: mod_base = OTHER; note = 2'-O-methyluridine-3'-phosphorothioate
  modified_base 19: mod_base = OTHER; note = 2'-O-methyluridine-3'-phosphorothioate
  modified_base 20: mod_base = OTHER; note = 2'-O-methylguanosine
  misc_feature 1..5: note = RNA
  misc_feature 16..20: note = RNA
  misc_feature 6..15: note = DNA
ggttccattttcagtgcttg

SEQ ID NO: 388 - DNA, 20 bp, synthetic construct
  source 1..20: mol_type = other DNA
  modified_base 1: mod_base = OTHER; note = 2'-O-methyluridine-3'-phosphorothioate
  modified_base 2: mod_base = OTHER; note = 2'-O-methylguanosine-3'-phosphorothioate
  modified_base 3: mod_base = OTHER; note = 2'-O-methylcytidine-3'-phosphorothioate
  modified_base 4: mod_base = OTHER; note = 2'-O-methyluridine-3'-phosphorothioate
  modified_base 5: mod_base = OTHER; note = 2'-O-methyluridine-3'-phosphorothioate
  modified_base 6: mod_base = OTHER; note = 2'-deoxythymidine-3'-phosphorothioate
  modified_base 7: mod_base = OTHER; note = 5'-methyl-deoxycytidine-3'-phosphorothioate
  modified_base 8: mod_base = OTHER; note = 2'-deoxyguanosine-3'-phosphorothioate
  modified_base 9: mod_base = OTHER; note = 5'-methyl-deoxycytidine-3'-phosphorothioate
  modified_base 10: mod_base = OTHER; note = 5'-methyl-deoxycytidine-3'-phosphorothioate
  modified_base 11: mod_base = OTHER; note = 2'-deoxyadenosine-3'-phosphorothioate
  modified_base 12: mod_base = OTHER; note = 2'-deoxyguanosine-3'-phosphorothioate
  modified_base 13: mod_base = OTHER; note = 2'-deoxyguanosine-3'-phosphorothioate
  modified_base 14: mod_base = OTHER; note = 2'-deoxythymidine-3'-phosphorothioate
  modified_base 15: mod_base = OTHER; note = 2'-deoxythymidine-3'-phosphorothioate
  modified_base 16: mod_base = OTHER; note = 2'-O-methylcytidine-3'-phosphorothioate
  modified_base 17: mod_base = OTHER; note = 2'-O-methylcytidine-3'-phosphorothioate
  modified_base 18: mod_base = OTHER; note = 2'-O-methyladenosine-3'-phosphorothioate
  modified_base 19: mod_base = OTHER; note = 2'-O-methyluridine-3'-phosphorothioate
  modified_base 20: mod_base = OTHER; note = 2'-O-methyluridine
  misc_feature 1..5: note = RNA
  misc_feature 16..20: note = RNA
  misc_feature 6..15: note = DNA
tgctttcgccaggttccatt

SEQ ID NO: 389 - DNA, 20 bp, synthetic construct
  source 1..20: mol_type = other DNA
  modified_base 1: mod_base = OTHER; note = 2'-O-methylcytidine-3'-phosphorothioate
  modified_base 2: mod_base = OTHER; note = 2'-O-methyladenosine-3'-phosphorothioate
  modified_base 3: mod_base = OTHER; note = 2'-O-methyluridine-3'-phosphorothioate
  modified_base 4: mod_base = OTHER; note = 2'-O-methyluridine-3'-phosphorothioate
  modified_base 5: mod_base = OTHER; note = 2'-O-methylcytidine-3'-phosphorothioate
  modified_base 6: mod_base = OTHER; note = 2'-deoxythymidine-3'-phosphorothioate
  modified_base 7: mod_base = OTHER; note = 5'-methyl-deoxycytidine-3'-phosphorothioate
  modified_base 8: mod_base = OTHER; note = 5'-methyl-deoxycytidine-3'-phosphorothioate
  modified_base 9: mod_base = OTHER; note = 2'-deoxythymidine-3'-phosphorothioate
  modified_base 10: mod_base = OTHER; note = 5'-methyl-deoxycytidine-3'-phosphorothioate
  modified_base 11: mod_base = OTHER; note = 5'-methyl-deoxycytidine-3'-phosphorothioate
  modified_base 12: mod_base = OTHER; note = 2'-deoxythymidine-3'-phosphorothioate
  modified_base 13: mod_base = OTHER; note = 5'-methyl-deoxycytidine-3'-phosphorothioate
  modified_base 14: mod_base = OTHER; note = 2'-deoxythymidine-3'-phosphorothioate
  modified_base 15: mod_base = OTHER; note = 2'-deoxyguanosine-3'-phosphorothioate
  modified_base 16: mod_base = OTHER; note = 2'-O-methylcytidine-3'-phosphorothioate
  modified_base 17: mod_base = OTHER; note = 2'-O-methyluridine-3'-phosphorothioate
  modified_base 18: mod_base = OTHER; note = 2'-O-methyluridine-3'-phosphorothioate
  modified_base 19: mod_base = OTHER; note = 2'-O-methyluridine-3'-phosphorothioate
  modified_base 20: mod_base = OTHER; note = 2'-O-methylcytidine
  misc_feature 1..5: note = RNA
  misc_feature 16..20: note = RNA
  misc_feature 6..15: note = DNA
cattctcctcctctgctttc

SEQ ID NO: 390 - DNA, 20 bp, synthetic construct
  source 1..20: mol_type = other DNA
  modified_base 1: mod_base = OTHER; note = 2'-O-methylcytidine-3'-phosphorothioate
  modified_base 2: mod_base = OTHER; note = 2'-O-methyladenosine-3'-phosphorothioate
  modified_base 3: mod_base = OTHER; note = 2'-O-methyluridine-3'-phosphorothioate
  modified_base 4: mod_base = OTHER; note = 2'-O-methylcytidine-3'-phosphorothioate
  modified_base 5: mod_base = OTHER; note = 2'-O-methyluridine-3'-phosphorothioate
  modified_base 6: mod_base = OTHER; note = 2'-deoxythymidine-3'-phosphorothioate
  modified_base 7: mod_base = OTHER; note = 2'-deoxythymidine-3'-phosphorothioate
  modified_base 8: mod_base = OTHER; note = 5'-methyl-deoxycytidine-3'-phosphorothioate
  modified_base 9: mod_base = OTHER; note = 2'-deoxythymidine-3'-phosphorothioate
  modified_base 10: mod_base = OTHER; note = 2'-deoxythymidine-3'-phosphorothioate
  modified_base 11: mod_base = OTHER; note = 5'-methyl-deoxycytidine-3'-phosphorothioate
  modified_base 12: mod_base = OTHER; note = 2'-deoxyadenosine-3'-phosphorothioate
  modified_base 13: mod_base = OTHER; note = 2'-deoxythymidine-3'-phosphorothioate
  modified_base 14: mod_base = OTHER; note = 2'-deoxythymidine-3'-phosphorothioate
  modified_base 15: mod_base = OTHER; note = 5'-methyl-deoxycytidine-3'-phosphorothioate
  modified_base 16: mod_base = OTHER; note = 2'-O-methyluridine-3'-phosphorothioate
  modified_base 17: mod_base = OTHER; note = 2'-O-methylcytidine-3'-phosphorothioate
  modified_base 18: mod_base = OTHER; note = 2'-O-methylcytidine-3'-phosphorothioate
  modified_base 19: mod_base = OTHER; note = 2'-O-methyluridine-3'-phosphorothioate
  modified_base 20: mod_base = OTHER; note = 2'-O-methylcytidine
  misc_feature 1..5: note = RNA
  misc_feature 16..20: note = RNA
  misc_feature 6..15: note = DNA
catctttcttcattctcctc

SEQ ID NO: 391 - DNA, 20 bp, synthetic construct
  source 1..20: mol_type = other DNA
  modified_base 1: mod_base = OTHER; note = 2'-O-methylcytidine-3'-phosphorothioate
  modified_base 2: mod_base = OTHER; note = 2'-O-methylcytidine-3'-phosphorothioate
  modified_base 3: mod_base = OTHER; note = 2'-O-methyluridine-3'-phosphorothioate
  modified_base 4: mod_base = OTHER; note = 2'-O-methylguanosine-3'-phosphorothioate
  modified_base 5: mod_base = OTHER; note = 2'-O-methyluridine-3'-phosphorothioate
  modified_base 6: mod_base = OTHER; note = 2'-deoxythymidine-3'-phosphorothioate
  modified_base 7: mod_base = OTHER; note = 2'-deoxythymidine-3'-phosphorothioate
  modified_base 8: mod_base = OTHER; note = 2'-deoxyguanosine-3'-phosphorothioate
  modified_base 9: mod_base = OTHER; note = 2'-deoxyadenosine-3'-phosphorothioate
  modified_base 10: mod_base = OTHER; note = 5'-methyl-deoxycytidine-3'-phosphorothioate
  modified_base 11: mod_base = OTHER; note = 2'-deoxythymidine-3'-phosphorothioate
  modified_base 12: mod_base = OTHER; note = 5'-methyl-deoxycytidine-3'-phosphorothioate
  modified_base 13: mod_base = OTHER; note = 5'-methyl-deoxycytidine-3'-phosphorothioate
  modified_base 14: mod_base = OTHER; note = 2'-deoxyadenosine-3'-phosphorothioate
  modified_base 15: mod_base = OTHER; note = 2'-deoxythymidine-3'-phosphorothioate
  modified_base 16: mod_base = OTHER; note = 2'-O-methylcytidine-3'-phosphorothioate
  modified_base 17: mod_base = OTHER; note = 2'-O-methyluridine-3'-phosphorothioate
  modified_base 18: mod_base = OTHER; note = 2'-O-methyluridine-3'-phosphorothioate
  modified_base 19: mod_base = OTHER; note = 2'-O-methyluridine-3'-phosphorothioate
  modified_base 20: mod_base = OTHER; note = 2'-O-methylcytidine
  misc_feature 1..5: note = RNA
  misc_feature 16..20: note = RNA
  misc_feature 6..15: note = DNA
cctgtttgactccatctttc

SEQ ID NO: 392 - DNA, 20 bp, synthetic construct
  source 1..20: mol_type = other DNA
  modified_base 1: mod_base = OTHER; note = 2'-O-methylcytidine-3'-phosphorothioate
  modified_base 2: mod_base = OTHER; note = 2'-O-methyluridine-3'-phosphorothioate
  modified_base 3: mod_base = OTHER; note = 2'-O-methylcytidine-3'-phosphorothioate
  modified_base 4: mod_base = OTHER; note = 2'-O-methylcytidine-3'-phosphorothioate
  modified_base 5: mod_base = OTHER; note = 2'-O-methyladenosine-3'-phosphorothioate
  modified_base 6: mod_base = OTHER; note = 2'-deoxyguanosine-3'-phosphorothioate
  modified_base 7: mod_base = OTHER; note = 2'-deoxyguanosine-3'-phosphorothioate
  modified_base 8: mod_base = OTHER; note = 5'-methyl-deoxycytidine-3'-phosphorothioate
  modified_base 9: mod_base = OTHER; note = 2'-deoxythymidine-3'-phosphorothioate
  modified_base 10: mod_base = OTHER; note = 5'-methyl-deoxycytidine-3'-phosphorothioate
  modified_base 11: mod_base = OTHER; note = 5'-methyl-deoxycytidine-3'-phosphorothioate
  modified_base 12: mod_base = OTHER; note = 5'-methyl-deoxycytidine-3'-phosphorothioate
  modified_base 13: mod_base = OTHER; note = 2'-deoxythymidine-3'-phosphorothioate
  modified_base 14: mod_base = OTHER; note = 2'-deoxyguanosine-3'-phosphorothioate
  modified_base 15: mod_base = OTHER; note = 2'-deoxythymidine-3'-phosphorothioate
  modified_base 16: mod_base = OTHER; note = 2'-O-methyluridine-3'-phosphorothioate
  modified_base 17: mod_base = OTHER; note = 2'-O-methyluridine-3'-phosphorothioate
  modified_base 18: mod_base = OTHER; note = 2'-O-methylguanosine-3'-phosphorothioate
  modified_base 19: mod_base = OTHER; note = 2'-O-methyladenosine-3'-phosphorothioate
  modified_base 20: mod_base = OTHER; note = 2'-O-methylcytidine
  misc_feature 1..5: note = RNA
  misc_feature 16..20: note = RNA
  misc_feature 6..15: note = DNA
ctccaggctccctgtttgac

SEQ ID NO: 393 - DNA, 20 bp, synthetic construct
  source 1..20: mol_type = other DNA
  modified_base 1: mod_base = OTHER; note = 2'-O-methylcytidine-3'-phosphorothioate
  modified_base 2: mod_base = OTHER; note = 2'-O-methyladenosine-3'-phosphorothioate
  modified_base 3: mod_base = OTHER; note = 2'-O-methyladenosine-3'-phosphorothioate
  modified_base 4: mod_base = OTHER; note = 2'-O-methylguanosine-3'-phosphorothioate
  modified_base 5: mod_base = OTHER; note = 2'-O-methylguanosine-3'-phosphorothioate
  modified_base 6: mod_base = OTHER; note = 2'-deoxythymidine-3'-phosphorothioate
  modified_base 7: mod_base = OTHER; note = 5'-methyl-deoxycytidine-3'-phosphorothioate
  modified_base 8: mod_base = OTHER; note = 2'-deoxythymidine-3'-phosphorothioate
  modified_base 9: mod_base = OTHER; note = 5'-methyl-deoxycytidine-3'-phosphorothioate
  modified_base 10: mod_base = OTHER; note = 5'-methyl-deoxycytidine-3'-phosphorothioate
  modified_base 11: mod_base = OTHER; note = 5'-methyl-deoxycytidine-3'-phosphorothioate
  modified_base 12: mod_base = OTHER; note = 2'-deoxythymidine-3'-phosphorothioate
  modified_base 13: mod_base = OTHER; note = 5'-methyl-deoxycytidine-3'-phosphorothioate
  modified_base 14: mod_base = OTHER; note = 5'-methyl-deoxycytidine-3'-phosphorothioate
  modified_base 15: mod_base = OTHER; note = 2'-deoxyadenosine-3'-phosphorothioate
  modified_base 16: mod_base = OTHER; note = 2'-O-methylguanosine-3'-phosphorothioate
  modified_base 17: mod_base = OTHER; note = 2'-O-methylguanosine-3'-phosphorothioate
  modified_base 18: mod_base = OTHER; note = 2'-O-methylcytidine-3'-phosphorothioate
  modified_base 19: mod_base = OTHER; note = 2'-O-methyluridine-3'-phosphorothioate
  modified_base 20: mod_base = OTHER; note = 2'-O-methylcytidine
  misc_feature 1..5: note = RNA
  misc_feature 16..20: note = RNA
  misc_feature 6..15: note = DNA
caaggtctccctccaggctc

SEQ ID NO: 394 - DNA, 20 bp, synthetic construct
  source 1..20: mol_type = other DNA
  modified_base 1: mod_base = OTHER; note = 2'-O-methyladenosine-3'-phosphorothioate
  modified_base 2: mod_base = OTHER; note = 2'-O-methyluridine-3'-phosphorothioate
  modified_base 3: mod_base = OTHER; note = 2'-O-methyluridine-3'-phosphorothioate
  modified_base 4: mod_base = OTHER; note = 2'-O-methyluridine-3'-phosphorothioate
  modified_base 5: mod_base = OTHER; note = 2'-O-methylguanosine-3'-phosphorothioate
  modified_base 6: mod_base = OTHER; note = 2'-deoxyadenosine-3'-phosphorothioate
  modified_base 7: mod_base = OTHER; note = 2'-deoxyadenosine-3'-phosphorothioate
  modified_base 8: mod_base = OTHER; note = 2'-deoxyadenosine-3'-phosphorothioate
  modified_base 9: mod_base = OTHER; note = 2'-deoxyguanosine-3'-phosphorothioate
  modified_base 10: mod_base = OTHER; note = 2'-deoxythymidine-3'-phosphorothioate
  modified_base 11: mod_base = OTHER; note = 2'-deoxyadenosine-3'-phosphorothioate
  modified_base 12: mod_base = OTHER; note = 2'-deoxythymidine-3'-phosphorothioate
  modified_base 13: mod_base = OTHER; note = 5'-methyl-deoxycytidine-3'-phosphorothioate
  modified_base 14: mod_base = OTHER; note = 2'-deoxyadenosine-3'-phosphorothioate
  modified_base 15: mod_base = OTHER; note = 2'-deoxyadenosine-3'-phosphorothioate
  modified_base 16: mod_base = OTHER; note = 2'-O-methylguanosine-3'-phosphorothioate
  modified_base 17: mod_base = OTHER; note = 2'-O-methylguanosine-3'-phosphorothioate
  modified_base 18: mod_base = OTHER; note = 2'-O-methyluridine-3'-phosphorothioate
  modified_base 19: mod_base = OTHER; note = 2'-O-methylcytidine-3'-phosphorothioate
  modified_base 20: mod_base = OTHER; note = 2'-O-methyluridine
  misc_feature 1..5: note = RNA
  misc_feature 16..20: note = RNA
  misc_feature 6..15: note = DNA
atttgaaagtatcaaggtct

SEQ ID NO: 395 - DNA, 20 bp, synthetic construct
  source 1..20: mol_type = other DNA
  modified_base 1: mod_base = OTHER; note = 2'-O-methyladenosine-3'-phosphorothioate
  modified_base 2: mod_base = OTHER; note = 2'-O-methylguanosine-3'-phosphorothioate
  modified_base 3: mod_base = OTHER; note = 2'-O-methylcytidine-3'-phosphorothioate
  modified_base 4: mod_base = OTHER; note = 2'-O-methylcytidine-3'-phosphorothioate
  modified_base 5: mod_base = OTHER; note = 2'-O-methylcytidine-3'-phosphorothioate
  modified_base 6: mod_base = OTHER; note = 5'-methyl-deoxycytidine-3'-phosphorothioate
  modified_base 7: mod_base = OTHER; note = 2'-deoxythymidine-3'-phosphorothioate
  modified_base 8: mod_base = OTHER; note = 5'-methyl-deoxycytidine-3'-phosphorothioate
  modified_base 9: mod_base = OTHER; note = 2'-deoxyadenosine-3'-phosphorothioate
  modified_base 10: mod_base = OTHER; note = 2'-deoxyguanosine-3'-phosphorothioate
  modified_base 11: mod_base = OTHER; note = 2'-deoxyguanosine-3'-phosphorothioate
  modified_base 12: mod_base = OTHER; note = 5'-methyl-deoxycytidine-3'-phosphorothioate
  modified_base 13: mod_base = OTHER; note = 2'-deoxyadenosine-3'-phosphorothioate
  modified_base 14: mod_base = OTHER; note = 2'-deoxythymidine-3'-phosphorothioate
  modified_base 15: mod_base = OTHER; note = 2'-deoxythymidine-3'-phosphorothioate
  modified_base 16: mod_base = OTHER; note = 2'-O-methyluridine-3'-phosphorothioate
  modified_base 17: mod_base = OTHER; note = 2'-O-methylguanosine-3'-phosphorothioate
  modified_base 18: mod_base = OTHER; note = 2'-O-methyladenosine-3'-phosphorothioate
  modified_base 19: mod_base = OTHER; note = 2'-O-methyladenosine-3'-phosphorothioate
  modified_base 20: mod_base = OTHER; note = 2'-O-methyladenosine
  misc_feature 1..5: note = RNA
  misc_feature 16..20: note = RNA
  misc_feature 6..15: note = DNA
agcccctcaggcatttgaaa

SEQ ID NO: 396 - DNA, 20 bp, synthetic construct
  source 1..20: mol_type = other DNA
  modified_base 1: mod_base = OTHER; note = 2'-O-methyladenosine-3'-phosphorothioate
  modified_base 2: mod_base = OTHER; note = 2'-O-methylguanosine-3'-phosphorothioate
  modified_base 3: mod_base = OTHER; note = 2'-O-methylguanosine-3'-phosphorothioate
  modified_base 4: mod_base = OTHER; note = 2'-O-methylcytidine-3'-phosphorothioate
  modified_base 5: mod_base = OTHER; note = 2'-O-methylguanosine-3'-phosphorothioate
  modified_base 6: mod_base = OTHER; note = 2'-deoxythymidine-3'-phosphorothioate
  modified_base 7: mod_base = OTHER; note = 5'-methyl-deoxycytidine-3'-phosphorothioate
  modified_base 8: mod_base = OTHER; note = 2'-deoxyguanosine-3'-phosphorothioate
  modified_base 9: mod_base = OTHER; note = 2'-deoxyadenosine-3'-phosphorothioate
  modified_base 10: mod_base = OTHER; note = 2'-deoxythymidine-3'-phosphorothioate
  modified_base 11: mod_base = OTHER; note = 2'-deoxyguanosine-3'-phosphorothioate
  modified_base 12: mod_base = OTHER; note = 2'-deoxyadenosine-3'-phosphorothioate
  modified_base 13: mod_base = OTHER; note = 2'-deoxyguanosine-3'-phosphorothioate
  modified_base 14: mod_base = OTHER; note = 5'-methyl-deoxycytidine-3'-phosphorothioate
  modified_base 15: mod_base = OTHER; note = 5'-methyl-deoxycytidine-3'-phosphorothioate
  modified_base 16: mod_base = OTHER; note = 2'-O-methylcytidine-3'-phosphorothioate
  modified_base 17: mod_base = OTHER; note = 2'-O-methylcytidine-3'-phosphorothioate
  modified_base 18: mod_base = OTHER; note = 2'-O-methyluridine-3'-phosphorothioate
  modified_base 19: mod_base = OTHER; note = 2'-O-methylcytidine-3'-phosphorothioate
  modified_base 20: mod_base = OTHER; note = 2'-O-methyladenosine
  misc_feature 1..5: note = RNA
  misc_feature 16..20: note = RNA
  misc_feature 6..15: note = DNA
aggcgtcgatgagcccctca

SEQ ID NO: 397 - DNA, 20 bp, synthetic construct
  source 1..20: mol_type = other DNA
  modified_base 1: mod_base = OTHER; note = 2'-O-methylcytidine-3'-phosphorothioate
  modified_base 2: mod_base = OTHER; note = 2'-O-methylcytidine-3'-phosphorothioate
  modified_base 3: mod_base = OTHER; note = 2'-O-methylcytidine-3'-phosphorothioate
  modified_base 4: mod_base = OTHER; note = 2'-O-methyluridine-3'-phosphorothioate
  modified_base 5: mod_base = OTHER; note = 2'-O-methylguanosine-3'-phosphorothioate
  modified_base 6: mod_base = OTHER; note = 2'-deoxythymidine-3'-phosphorothioate
  modified_base 7: mod_base = OTHER; note = 5'-methyl-deoxycytidine-3'-phosphorothioate
  modified_base 8: mod_base = OTHER; note = 2'-deoxyadenosine-3'-phosphorothioate
  modified_base 9: mod_base = OTHER; note = 5'-methyl-deoxycytidine-3'-phosphorothioate
  modified_base 10: mod_base = OTHER; note = 2'-deoxyadenosine-3'-phosphorothioate
  modified_base 11: mod_base = OTHER; note = 2'-deoxyguanosine-3'-phosphorothioate
  modified_base 12: mod_base = OTHER; note = 2'-deoxyguanosine-3'-phosphorothioate
  modified_base 13: mod_base = OTHER; note = 5'-methyl-deoxycytidine-3'-phosphorothioate
  modified_base 14: mod_base = OTHER; note = 2'-deoxyguanosine-3'-phosphorothioate
  modified_base 15: mod_base = OTHER; note = 2'-deoxythymidine-3'-phosphorothioate
  modified_base 16: mod_base = OTHER; note = 2'-O-methylcytidine-3'-phosphorothioate
  modified_base 17: mod_base = OTHER; note = 2'-O-methylguanosine-3'-phosphorothioate
  modified_base 18: mod_base = OTHER; note = 2'-O-methyladenosine-3'-phosphorothioate
  modified_base 19: mod_base = OTHER; note = 2'-O-methyluridine-3'-phosphorothioate
  modified_base 20: mod_base = OTHER; note = 2'-O-methylguanosine
  misc_feature 1..5: note = RNA
  misc_feature 16..20: note = RNA
  misc_feature 6..15: note = DNA
ccctgtcacaggcgtcgatg

SEQ ID NO: 398 - DNA, 20 bp, synthetic construct
  source 1..20: mol_type = other DNA
  modified_base 1: mod_base = OTHER; note = 2'-O-methyladenosine-3'-phosphorothioate
  modified_base 2: mod_base = OTHER; note = 2'-O-methyladenosine-3'-phosphorothioate
  modified_base 3: mod_base = OTHER; note = 2'-O-methylguanosine-3'-phosphorothioate
  modified_base 4: mod_base = OTHER; note = 2'-O-methyluridine-3'-phosphorothioate
  modified_base 5: mod_base = OTHER; note = 2'-O-methyladenosine-3'-phosphorothioate
  modified_base 6: mod_base = OTHER; note = 2'-deoxythymidine-3'-phosphorothioate
  modified_base 7: mod_base = OTHER; note = 5'-methyl-deoxycytidine-3'-phosphorothioate
  modified_base 8: mod_base = OTHER; note = 5'-methyl-deoxycytidine-3'-phosphorothioate
  modified_base 9: mod_base = OTHER; note = 2'-deoxythymidine-3'-phosphorothioate
  modified_base 10: mod_base = OTHER; note = 2'-deoxythymidine-3'-phosphorothioate
  modified_base 11: mod_base = OTHER; note = 2'-deoxythymidine-3'-phosphorothioate
  modified_base 12: mod_base = OTHER; note = 5'-methyl-deoxycytidine-3'-phosphorothioate
  modified_base 13: mod_base = OTHER; note = 2'-deoxythymidine-3'-phosphorothioate
  modified_base 14: mod_base = OTHER; note = 5'-methyl-deoxycytidine-3'-phosphorothioate
  modified_base 15: mod_base = OTHER; note = 5'-methyl-deoxycytidine-3'-phosphorothioate
  modified_base 16: mod_base = OTHER; note = 2'-O-methylcytidine-3'-phosphorothioate
  modified_base 17: mod_base = OTHER; note = 2'-O-methyluridine-3'-phosphorothioate
  modified_base 18: mod_base = OTHER; note = 2'-O-methylguanosine-3'-phosphorothioate
  modified_base 19: mod_base = OTHER; note = 2'-O-methyluridine-3'-phosphorothioate
  modified_base 20: mod_base = OTHER; note = 2'-O-methylcytidine
  misc_feature 1..5: note = RNA
  misc_feature 16..20: note = RNA
  misc_feature 6..15: note = DNA
aagtatcctttctccctgtc

SEQ ID NO: 399 - DNA, 20 bp, synthetic construct
  source 1..20: mol_type = other DNA
  modified_base 1: mod_base = OTHER; note = 2'-O-methylcytidine-3'-phosphorothioate
  modified_base 2: mod_base = OTHER; note = 2'-O-methyluridine-3'-phosphorothioate
  modified_base 3: mod_base = OTHER; note = 2'-O-methyluridine-3'-phosphorothioate
  modified_base 4: mod_base = OTHER; note = 2'-O-methylguanosine-3'-phosphorothioate
  modified_base 5: mod_base = OTHER; note = 2'-O-methyluridine-3'-phosphorothioate
  modified_base 6: mod_base = OTHER; note = 2'-deoxythymidine-3'-phosphorothioate
  modified_base 7: mod_base = OTHER; note = 5'-methyl-deoxycytidine-3'-phosphorothioate
  modified_base 8: mod_base = OTHER; note = 2'-deoxyadenosine-3'-phosphorothioate
  modified_base 9: mod_base = OTHER; note = 2'-deoxyguanosine-3'-phosphorothioate
  modified_base 10: mod_base = OTHER; note = 2'-deoxyadenosine-3'-phosphorothioate
  modified_base 11: mod_base = OTHER; note = 2'-deoxyadenosine-3'-phosphorothioate
  modified_base 12: mod_base = OTHER; note = 2'-deoxyguanosine-3'-phosphorothioate
  modified_base 13: mod_base = OTHER; note = 2'-deoxythymidine-3'-phosphorothioate
  modified_base 14: mod_base = OTHER; note = 2'-deoxyadenosine-3'-phosphorothioate
  modified_base 15: mod_base = OTHER; note = 2'-deoxythymidine-3'-phosphorothioate
  modified_base 16: mod_base = OTHER; note = 2'-O-methylcytidine-3'-phosphorothioate
  modified_base 17: mod_base = OTHER; note = 2'-O-methylcytidine-3'-phosphorothioate
  modified_base 18: mod_base = OTHER; note = 2'-O-methyluridine-3'-phosphorothioate
  modified_base 19: mod_base = OTHER; note = 2'-O-methyluridine-3'-phosphorothioate
  modified_base 20: mod_base = OTHER; note = 2'-O-methyluridine
  misc_feature 1..5: note = RNA
  misc_feature 16..20: note = RNA
  misc_feature 6..15: note = DNA
cttgttcagaagtatccttt

SEQ ID NO: 400 - DNA, 20 bp, synthetic construct
  source 1..20: mol_type = other DNA
  modified_base 1: mod_base = OTHER; note = 2'-O-methyluridine-3'-phosphorothioate
  modified_base 2: mod_base = OTHER; note = 2'-O-methylguanosine-3'-phosphorothioate
  modified_base 3: mod_base = OTHER; note = 2'-O-methylcytidine-3'-phosphorothioate
  modified_base 4: mod_base = OTHER; note = 2'-O-methyluridine-3'-phosphorothioate
  modified_base 5: mod_base = OTHER; note = 2'-O-methyluridine-3'-phosphorothioate
  modified_base 6: mod_base = OTHER; note = 2'-deoxyguanosine-3'-phosphorothioate
  modified_base 7: mod_base = OTHER; note = 2'-deoxyguanosine-3'-phosphorothioate
  modified_base 8: mod_base = OTHER; note = 2'-deoxyadenosine-3'-phosphorothioate
  modified_base 9: mod_base = OTHER; note = 2'-deoxyguanosine-3'-phosphorothioate
  modified_base 10: mod_base = OTHER; note = 2'-deoxyguanosine-3'-phosphorothioate
  modified_base 11: mod_base = OTHER; note = 5'-methyl-deoxycytidine-3'-phosphorothioate
  modified_base 12: mod_base = OTHER; note = 2'-deoxythymidine-3'-phosphorothioate
  modified_base 13: mod_base = OTHER; note = 5'-methyl-deoxycytidine-3'-phosphorothioate
  modified_base 14: mod_base = OTHER; note = 5'-methyl-deoxycytidine-3'-phosphorothioate
  modified_base 15: mod_base = OTHER; note = 2'-deoxythymidine-3'-phosphorothioate
  modified_base 16: mod_base = OTHER; note = 2'-O-methyluridine-3'-phosphorothioate
  modified_base 17: mod_base = OTHER; note = 2'-O-methylguanosine-3'-phosphorothioate
  modified_base 18: mod_base = OTHER; note = 2'-O-methyluridine-3'-phosphorothioate
  modified_base 19: mod_base = OTHER; note = 2'-O-methyluridine-3'-phosphorothioate
  modified_base 20: mod_base = OTHER; note = 2'-O-methylcytidine
  misc_feature 1..5: note = RNA
  misc_feature 16..20: note = RNA
  misc_feature 6..15: note = DNA
tgcttggaggctccttgttc

SEQ ID NO: 401 - DNA, 20 bp, synthetic construct
  source 1..20: mol_type = other DNA
  modified_base 1: mod_base = OTHER; note = 2'-O-methyladenosine-3'-phosphorothioate
  modified_base 2: mod_base = OTHER; note = 2'-O-methyladenosine-3'-phosphorothioate
  modified_base 3: mod_base = OTHER; note = 2'-O-methyluridine-3'-phosphorothioate
  modified_base 4: mod_base = OTHER; note = 2'-O-methylguanosine-3'-phosphorothioate
  modified_base 5: mod_base = OTHER; note = 2'-O-methylguanosine-3'-phosphorothioate
  modified_base 6: mod_base = OTHER; note = 2'-deoxyadenosine-3'-phosphorothioate
  modified_base 7: mod_base = OTHER; note = 2'-deoxythymidine-3'-phosphorothioate
  modified_base 8: mod_base = OTHER; note = 2'-deoxyguanosine-3'-phosphorothioate
  modified_base 9: mod_base = OTHER; note = 2'-deoxyadenosine-3'-phosphorothioate
  modified_base 10: mod_base = OTHER; note = 2'-deoxythymidine-3'-phosphorothioate
  modified_base 11: mod_base = OTHER; note = 2'-deoxythymidine-3'-phosphorothioate
  modified_base 12: mod_base = OTHER; note = 2'-deoxythymidine-3'-phosphorothioate
  modified_base 13: mod_base = OTHER; note = 2'-deoxyguanosine-3'-phosphorothioate
  modified_base 14: mod_base = OTHER; note = 5'-methyl-deoxycytidine-3'-phosphorothioate
  modified_base 15: mod_base = OTHER; note = 2'-deoxythymidine-3'-phosphorothioate
  modified_base 16: mod_base = OTHER; note = 2'-O-methyluridine-3'-phosphorothioate
  modified_base 17: mod_base = OTHER; note = 2'-O-methylguanosine-3'-phosphorothioate
  modified_base 18: mod_base = OTHER; note = 2'-O-methylguanosine-3'-phosphorothioate
  modified_base 19: mod_base = OTHER; note = 2'-O-methyladenosine-3'-phosphorothioate
  modified_base 20: mod_base = OTHER; note = 2'-O-methylguanosine
  misc_feature 1..5: note = RNA
  misc_feature 16..20: note = RNA
  misc_feature 6..15: note = DNA
aatggatgatttgcttggag

SEQ ID NO: 402 - DNA, 20 bp, synthetic construct
  source 1..20: mol_type = other DNA
  modified_base 1: mod_base = OTHER; note = 2'-O-methyluridine-3'-phosphorothioate
  modified_base 2: mod_base = OTHER; note = 2'-O-methyladenosine-3'-phosphorothioate
  modified_base 3: mod_base = OTHER; note = 2'-O-methylguanosine-3'-phosphorothioate
  modified_base 4: mod_base = OTHER; note = 2'-O-methylguanosine-3'-phosphorothioate
  modified_base 5: mod_base = OTHER; note = 2'-O-methyladenosine-3'-phosphorothioate
  modified_base 6: mod_base = OTHER; note = 2'-deoxythymidine-3'-phosphorothioate
  modified_base 7: mod_base = OTHER; note = 2'-deoxyguanosine-3'-phosphorothioate
  modified_base 8: mod_base = OTHER; note = 2'-deoxyadenosine-3'-phosphorothioate
  modified_base 9: mod_base = OTHER; note = 2'-deoxyguanosine-3'-phosphorothioate
  modified_base 10: mod_base = OTHER; note = 5'-methyl-deoxycytidine-3'-phosphorothioate
  modified_base 11: mod_base = OTHER; note = 2'-deoxyadenosine-3'-phosphorothioate
  modified_base 12: mod_base = OTHER; note = 2'-deoxyadenosine-3'-phosphorothioate
  modified_base 13: mod_base = OTHER; note = 2'-deoxythymidine-3'-phosphorothioate
  modified_base 14: mod_base = OTHER; note = 2'-deoxyguanosine-3'-phosphorothioate
  modified_base 15: mod_base = OTHER; note = 2'-deoxyguanosine-3'-phosphorothioate
  modified_base 16: mod_base = OTHER; note = 2'-O-methyladenosine-3'-phosphorothioate
  modified_base 17: mod_base = OTHER; note = 2'-O-methyluridine-3'-phosphorothioate
  modified_base 18: mod_base = OTHER; note = 2'-O-methylguanosine-3'-phosphorothioate
  modified_base 19: mod_base = OTHER; note = 2'-O-methyladenosine-3'-phosphorothioate
  modified_base 20: mod_base = OTHER; note = 2'-O-methyluridine
  misc_feature 1..5: note = RNA
  misc_feature 16..20: note = RNA
  misc_feature 6..15: note = DNA
taggatgagcaatggatgat

SEQ ID NO: 403 - DNA, 20 bp, synthetic construct
  source 1..20: mol_type = other DNA
  modified_base 1: mod_base = OTHER; note = 2'-O-methyladenosine-3'-phosphorothioate
  modified_base 2: mod_base = OTHER; note = 2'-O-methyladenosine-3'-phosphorothioate
  modified_base 3: mod_base = OTHER; note = 2'-O-methylcytidine-3'-phosphorothioate
  modified_base 4: mod_base = OTHER; note = 2'-O-methylcytidine-3'-phosphorothioate
  modified_base 5: mod_base = OTHER; note = 2'-O-methylcytidine-3'-phosphorothioate
  modified_base 6: mod_base = OTHER; note = 2'-deoxyguanosine-3'-phosphorothioate
  modified_base 7: mod_base = OTHER; note = 2'-deoxythymidine-3'-phosphorothioate
  modified_base 8: mod_base = OTHER; note = 5'-methyl-deoxycytidine-3'-phosphorothioate
  modified_base 9: mod_base = OTHER; note = 2'-deoxythymidine-3'-phosphorothioate
  modified_base 10: mod_base = OTHER; note = 2'-deoxythymidine-3'-phosphorothioate
  modified_base 11: mod_base = OTHER; note = 5'-methyl-deoxycytidine-3'-phosphorothioate
  modified_base 12: mod_base = OTHER; note = 5'-methyl-deoxycytidine-3'-phosphorothioate
  modified_base 13: mod_base = OTHER; note = 2'-deoxythymidine-3'-phosphorothioate
  modified_base 14: mod_base = OTHER; note = 2'-deoxyadenosine-3'-phosphorothioate
  modified_base 15: mod_base = OTHER; note = 2'-deoxyguanosine-3'-phosphorothioate
  modified_base 16: mod_base = OTHER; note = 2'-O-methylguanosine-3'-phosphorothioate
  modified_base 17: mod_base = OTHER; note = 2'-O-methyladenosine-3'-phosphorothioate
  modified_base 18: mod_base = OTHER; note = 2'-O-methyluridine-3'-phosphorothioate
  modified_base 19: mod_base = OTHER; note = 2'-O-methylguanosine-3'-phosphorothioate
  modified_base 20: mod_base = OTHER; note = 2'-O-methyladenosine
  misc_feature 1..5: note = RNA
  misc_feature 16..20: note = RNA
  misc_feature 6..15: note = DNA
aacccgtcttcctaggatga

SEQ ID NO: 404 - DNA, 20 bp, synthetic construct
  source 1..20: mol_type = other DNA
  modified_base 1: mod_base = OTHER; note = 2'-O-methyladenosine-3'-phosphorothioate
  modified_base 2: mod_base = OTHER; note = 2'-O-methylguanosine-3'-phosphorothioate
  modified_base 3: mod_base = OTHER; note = 2'-O-methylguanosine-3'-phosphorothioate
  modified_base 4: mod_base = OTHER; note = 2'-O-methylguanosine-3'-phosphorothioate
  modified_base 5: mod_base = OTHER; note = 2'-O-methyladenosine-3'-phosphorothioate
  modified_base 6: mod_base = OTHER; note = 2'-deoxythymidine-3'-phosphorothioate
  modified_base 7: mod_base = OTHER; note = 2'-deoxythymidine-3'-phosphorothioate
  modified_base 8: mod_base = OTHER; note = 5'-methyl-deoxycytidine-3'-phosphorothioate
  modified_base 9: mod_base = OTHER; note = 2'-deoxythymidine-3'-phosphorothioate
  modified_base 10: mod_base = OTHER; note = 5'-methyl-deoxycytidine-3'-phosphorothioate
  modified_base 11: mod_base = OTHER; note = 2'-deoxyadenosine-3'-phosphorothioate
  modified_base 12: mod_base = OTHER; note = 2'-deoxyadenosine-3'-phosphorothioate
  modified_base 13: mod_base = OTHER; note = 5'-methyl-deoxycytidine-3'-phosphorothioate
  modified_base 14: mod_base = OTHER; note = 5'-methyl-deoxycytidine-3'-phosphorothioate
  modified_base 15: mod_base = OTHER; note = 5'-methyl-deoxycytidine-3'-phosphorothioate
  modified_base 16: mod_base = OTHER; note = 2'-O-methylguanosine-3'-phosphorothioate
  modified_base 17: mod_base = OTHER; note = 2'-O-methyluridine-3'-phosphorothioate
  modified_base 18: mod_base = OTHER; note = 2'-O-methylcytidine-3'-phosphorothioate
  modified_base 19: mod_base = OTHER; note = 2'-O-methyluridine-3'-phosphorothioate
  modified_base 20: mod_base = OTHER; note = 2'-O-methyluridine
  misc_feature 1..5: note = RNA
  misc_feature 16..20: note = RNA
  misc_feature 6..15: note = DNA
agggattctcaacccgtctt

SEQ ID NO: 405 - DNA, 20 bp, synthetic construct
  source 1..20: mol_type = other DNA
  modified_base 1: mod_base = OTHER; note = 2'-O-methyladenosine-3'-phosphorothioate
  modified_base 2: mod_base = OTHER; note = 2'-O-methylcytidine-3'-phosphorothioate
  modified_base 3: mod_base = OTHER; note = 2'-O-methylcytidine-3'-phosphorothioate
  modified_base 4: mod_base = OTHER; note = 2'-O-methylcytidine-3'-phosphorothioate
  modified_base 5: mod_base = OTHER; note = 2'-O-methyluridine-3'-phosphorothioate
  modified_base 6: mod_base = OTHER; note = 5'-methyl-deoxycytidine-3'-phosphorothioate
  modified_base 7: mod_base = OTHER; note = 2'-deoxyadenosine-3'-phosphorothioate
  modified_base 8: mod_base = OTHER; note = 2'-deoxyadenosine-3'-phosphorothioate
  modified_base 9: mod_base = OTHER; note = 2'-deoxyadenosine-3'-phosphorothioate
  modified_base 10: mod_base = OTHER; note = 2'-deoxythymidine-3'-phosphorothioate
  modified_base 11: mod_base = OTHER; note = 2'-deoxythymidine-3'-phosphorothioate
  modified_base 12: mod_base = OTHER; note = 2'-deoxyadenosine-3'-phosphorothioate
  modified_base 13: mod_base = OTHER; note = 2'-deoxyguanosine-3'-phosphorothioate
  modified_base 14: mod_base = OTHER; note = 2'-deoxyguanosine-3'-phosphorothioate
  modified_base 15: mod_base = OTHER; note = 2'-deoxyguanosine-3'-phosphorothioate
  modified_base 16: mod_base = OTHER; note = 2'-O-methyladenosine-3'-phosphorothioate
  modified_base 17: mod_base = OTHER; note = 2'-O-methyluridine-3'-phosphorothioate
  modified_base 18: mod_base = OTHER; note = 2'-O-methyluridine-3'-phosphorothioate
  modified_base 19: mod_base = OTHER; note = 2'-O-methylcytidine-3'-phosphorothioate
  modified_base 20: mod_base = OTHER; note = 2'-O-methyluridine
  misc_feature 1..5: note = RNA
  misc_feature 16..20: note = RNA
  misc_feature 6..15: note = DNA
accctcaaattagggattct

SEQ ID NO: 406 - DNA, 20 bp, synthetic construct
  source 1..20: mol_type = other DNA
  modified_base 1: mod_base = OTHER; note = 2'-O-methylguanosine-3'-phosphorothioate
  modified_base 2: mod_base = OTHER; note = 2'-O-methylcytidine-3'-phosphorothioate
  modified_base 3: mod_base = OTHER; note = 2'-O-methyladenosine-3'-phosphorothioate
  modified_base 4: mod_base = OTHER; note = 2'-O-methylguanosine-3'-phosphorothioate
  modified_base 5: mod_base = OTHER; note = 2'-O-methylguanosine-3'-phosphorothioate
  modified_base 6: mod_base = OTHER; note = 2'-deoxyadenosine-3'-phosphorothioate
  modified_base 7: mod_base = OTHER; note = 2'-deoxyadenosine-3'-phosphorothioate
  modified_base 8: mod_base = OTHER; note = 5'-methyl-deoxycytidine-3'-phosphorothioate
  modified_base 9: mod_base = OTHER; note = 2'-deoxythymidine-3'-phosphorothioate
  modified_base 10: mod_base = OTHER; note = 2'-deoxyguanosine-3'-phosphorothioate
  modified_base 11: mod_base = OTHER; note = 2'-deoxyadenosine-3'-phosphorothioate
  modified_base 12: mod_base = OTHER; note = 5'-methyl-deoxycytidine-3'-phosphorothioate
  modified_base 13: mod_base = OTHER; note = 5'-methyl-deoxycytidine-3'-phosphorothioate
  modified_base 14: mod_base = OTHER; note = 5'-methyl-deoxycytidine-3'-phosphorothioate
  modified_base 15: mod_base = OTHER; note = 2'-deoxythymidine-3'-phosphorothioate
  modified_base 16: mod_base = OTHER; note = 2'-O-methylcytidine-3'-phosphorothioate
  modified_base 17: mod_base = OTHER; note = 2'-O-methyladenosine-3'-phosphorothioate
  modified_base 18: mod_base = OTHER; note = 2'-O-methyladenosine-3'-phosphorothioate
  modified_base 19: mod_base = OTHER; note = 2'-O-methyladenosine-3'-phosphorothioate
  modified_base 20: mod_base = OTHER; note = 2'-O-methyluridine
  misc_feature 1..5: note = RNA
  misc_feature 16..20: note = RNA
  misc_feature 6..15: note = DNA
gcaggaactgaccctcaaat

SEQ ID NO: 407 - DNA, 20 bp, synthetic construct
  source 1..20: mol_type = other DNA
  modified_base 1: mod_base = OTHER; note = 2'-O-methyladenosine-3'-phosphorothioate
  modified_base 2: mod_base = OTHER; note = 2'-O-methyladenosine-3'-phosphorothioate
  modified_base 3: mod_base = OTHER; note = 2'-O-methylguanosine-3'-phosphorothioate
  modified_base 4: mod_base = OTHER; note = 2'-O-methylguanosine-3'-phosphorothioate
  modified_base 5: mod_base = OTHER; note = 2'-O-methylguanosine-3'-phosphorothioate
  modified_base 6: mod_base = OTHER; note = 5'-methyl-deoxycytidine-3'-phosphorothioate
  modified_base 7: mod_base = OTHER; note = 2'-deoxyadenosine-3'-phosphorothioate
  modified_base 8: mod_base = OTHER; note = 5'-methyl-deoxycytidine-3'-phosphorothioate
  modified_base 9: mod_base = OTHER; note = 2'-deoxythymidine-3'-phosphorothioate
  modified_base 10: mod_base = OTHER; note = 2'-deoxythymidine-3'-phosphorothioate
  modified_base 11: mod_base = OTHER; note = 5'-methyl-deoxycytidine-3'-phosphorothioate
  modified_base 12: mod_base = OTHER; note = 2'-deoxythymidine-3'-phosphorothioate
  modified_base 13: mod_base = OTHER; note = 2'-deoxyguanosine-3'-phosphorothioate
  modified_base 14: mod_base = OTHER; note = 5'-methyl-deoxycytidine-3'-phosphorothioate
  modified_base 15: mod_base = OTHER; note = 2'-deoxyadenosine-3'-phosphorothioate
  modified_base 16: mod_base = OTHER; note = 2'-O-methylguanosine-3'-phosphorothioate
  modified_base 17: mod_base = OTHER; note = 2'-O-methylguanosine-3'-phosphorothioate
  modified_base 18: mod_base = OTHER; note = 2'-O-methyladenosine-3'-phosphorothioate
  modified_base 19: mod_base = OTHER; note = 2'-O-methyladenosine-3'-phosphorothioate
  modified_base 20: mod_base = OTHER; note = 2'-O-methylcytidine
  misc_feature 1..5: note = RNA
  misc_feature 16..20: note = RNA
  misc_feature 6..15: note = DNA
aagggcacttctgcaggaac

SEQ ID NO: 408 - DNA, 20 bp, synthetic construct
  source 1..20: mol_type = other DNA
  modified_base 1: mod_base = OTHER; note = 2'-O-methyladenosine-3'-phosphorothioate
  modified_base 2: mod_base = OTHER; note = 2'-O-methylguanosine-3'-phosphorothioate
  modified_base 3: mod_base = OTHER; note = 2'-O-methyluridine-3'-phosphorothioate
  modified_base 4: mod_base = OTHER; note = 2'-O-methylguanosine-3'-phosphorothioate
  modified_base 5: mod_base = OTHER; note = 2'-O-methylguanosine-3'-phosphorothioate
  modified_base 6: mod_base = OTHER; note = 2'-deoxyadenosine-3'-phosphorothioate
  modified_base 7: mod_base = OTHER; note = 2'-deoxyguanosine-3'-phosphorothioate
  modified_base 8: mod_base = OTHER; note = 2'-deoxyguanosine-3'-phosphorothioate
  modified_base 9: mod_base = OTHER; note = 5'-methyl-deoxycytidine-3'-phosphorothioate
  modified_base 10: mod_base = OTHER; note = 2'-deoxyadenosine-3'-phosphorothioate
  modified_base 11: mod_base = OTHER; note = 2'-deoxyadenosine-3'-phosphorothioate
  modified_base 12: mod_base = OTHER; note = 2'-deoxyadenosine-3'-phosphorothioate
  modified_base 13: mod_base = OTHER; note = 2'-deoxyguanosine-3'-phosphorothioate
  modified_base 14: mod_base = OTHER; note = 2'-deoxyguanosine-3'-phosphorothioate
  modified_base 15: mod_base = OTHER; note = 2'-deoxyguanosine-3'-phosphorothioate
  modified_base 16: mod_base = OTHER; note = 2'-O-methylcytidine-3'-phosphorothioate
  modified_base 17: mod_base = OTHER; note = 2'-O-methyladenosine-3'-phosphorothioate
  modified_base 18: mod_base = OTHER; note = 2'-O-methylcytidine-3'-phosphorothioate
  modified_base 19: mod_base = OTHER; note = 2'-O-methyluridine-3'-phosphorothioate
  modified_base 20: mod_base = OTHER; note = 2'-O-methyluridine
  misc_feature 1..5: note = RNA
  misc_feature 16..20: note = RNA
  misc_feature 6..15: note = DNA
agtggaggcaaagggcactt

SEQ ID NO: 409 - DNA, 20 bp, synthetic construct
  source 1..20: mol_type = other DNA
  modified_base 1: mod_base = OTHER; note = 2'-O-methyladenosine-3'-phosphorothioate
  modified_base 2: mod_base = OTHER; note = 2'-O-methyladenosine-3'-phosphorothioate
  modified_base 3: mod_base = OTHER; note = 2'-O-methyluridine-3'-phosphorothioate
  modified_base 4: mod_base = OTHER; note = 2'-O-methyluridine-3'-phosphorothioate
  modified_base 5: mod_base = OTHER; note = 2'-O-methylguanosine-3'-phosphorothioate
  modified_base 6: mod_base = OTHER; note = 2'-deoxyadenosine-3'-phosphorothioate
  modified_base 7: mod_base = OTHER; note = 2'-deoxyguanosine-3'-phosphorothioate
  modified_base 8: mod_base = OTHER; note = 2'-deoxyguanosine-3'-phosphorothioate
  modified_base 9: mod_base = OTHER; note = 5'-methyl-deoxycytidine-3'-phosphorothioate
  modified_base 10: mod_base = OTHER; note = 2'-deoxyadenosine-3'-phosphorothioate
  modified_base 11: mod_base = OTHER; note = 2'-deoxythymidine-3'-phosphorothioate
  modified_base 12: mod_base = OTHER; note = 2'-deoxythymidine-3'-phosphorothioate
  modified_base 13: mod_base = OTHER; note = 2'-deoxyguanosine-3'-phosphorothioate
  modified_base 14: mod_base = OTHER; note = 2'-deoxyadenosine-3'-phosphorothioate
  modified_base 15: mod_base = OTHER; note = 2'-deoxyguanosine-3'-phosphorothioate
  modified_base 16: mod_base = OTHER; note = 2'-O-methyluridine-3'-phosphorothioate
  modified_base 17: mod_base = OTHER; note = 2'-O-methylguanosine-3'-phosphorothioate
  modified_base 18: mod_base = OTHER; note = 2'-O-methylguanosine-3'-phosphorothioate
  modified_base 19: mod_base = OTHER; note = 2'-O-methyladenosine-3'-phosphorothioate
  modified_base 20: mod_base = OTHER; note = 2'-O-methylguanosine
  misc_feature 1..5: note = RNA
  misc_feature 16..20: note = RNA
  misc_feature 6..15: note = DNA
aattgaggcattgagtggag

SEQ ID NO: 410 - DNA, 20 bp, synthetic construct
  source 1..20: mol_type = other DNA
  modified_base 1: mod_base = OTHER; note = 2'-O-methylcytidine-3'-phosphorothioate
  modified_base 2: mod_base = OTHER; note = 2'-O-methyladenosine-3'-phosphorothioate
  modified_base 3: mod_base = OTHER; note = 2'-O-methylguanosine-3'-phosphorothioate
  modified_base 4: mod_base = OTHER; note = 2'-O-methyladenosine-3'-phosphorothioate
  modified_base 5: mod_base = OTHER; note = 2'-O-methyladenosine-3'-phosphorothioate
  modified_base 6: mod_base = OTHER; note = 2'-deoxyadenosine-3'-phosphorothioate
  modified_base 7: mod_base = OTHER; note = 2'-deoxyadenosine-3'-phosphorothioate
  modified_base 8: mod_base = OTHER; note = 5'-methyl-deoxycytidine-3'-phosphorothioate
  modified_base 9: mod_base = OTHER; note = 2'-deoxyadenosine-3'-phosphorothioate
  modified_base 10: mod_base = OTHER; note = 2'-deoxyadenosine-3'-phosphorothioate
  modified_base 11: mod_base = OTHER; note = 2'-deoxyadenosine-3'-phosphorothioate
  modified_base 12: mod_base = OTHER; note = 2'-deoxythymidine-3'-phosphorothioate
  modified_base 13: mod_base = OTHER; note = 2'-deoxythymidine-3'-phosphorothioate
  modified_base 14: mod_base = OTHER; note = 2'-deoxyguanosine-3'-phosphorothioate
  modified_base 15: mod_base = OTHER; note = 2'-deoxyadenosine-3'-phosphorothioate
  modified_base 16: mod_base = OTHER; note = 2'-O-methylguanosine-3'-phosphorothioate
  modified_base 17: mod_base = OTHER; note = 2'-O-methylguanosine-3'-phosphorothioate
  modified_base 18: mod_base = OTHER; note = 2'-O-methylcytidine-3'-phosphorothioate
  modified_base 19: mod_base = OTHER; note = 2'-O-methyladenosine-3'-phosphorothioate
  modified_base 20: mod_base = OTHER; note = 2'-O-methyluridine
  misc_feature 1..5: note = RNA
  misc_feature 16..20: note = RNA
  misc_feature 6..15: note = DNA
cagaaaacaaattgaggcat

SEQ ID NO: 411 - DNA, 20 bp, synthetic construct
  source 1..20: mol_type = other DNA
  modified_base 1: mod_base = OTHER; note = 2'-O-methyladenosine-3'-phosphorothioate
  modified_base 2: mod_base = OTHER; note = 2'-O-methylcytidine-3'-phosphorothioate
  modified_base 3: mod_base = OTHER; note = 2'-O-methyluridine-3'-phosphorothioate
  modified_base 4: mod_base = OTHER; note = 2'-O-methylcytidine-3'-phosphorothioate
  modified_base 5: mod_base = OTHER; note = 2'-O-methyluridine-3'-phosphorothioate
  modified_base 6: mod_base = OTHER; note = 5'-methyl-deoxycytidine-3'-phosphorothioate
  modified_base 7: mod_base = OTHER; note = 2'-deoxyadenosine-3'-phosphorothioate
  modified_base 8: mod_base = OTHER; note = 2'-deoxyguanosine-3'-phosphorothioate
  modified_base 9: mod_base = OTHER; note = 2'-deoxythymidine-3'-phosphorothioate
  modified_base 10: mod_base = OTHER; note = 5'-methyl-deoxycytidine-3'-phosphorothioate
  modified_base 11: mod_base = OTHER; note = 2'-deoxyadenosine-3'-phosphorothioate
  modified_base 12: mod_base = OTHER; note = 2'-deoxythymidine-3'-phosphorothioate
  modified_base 13: mod_base = OTHER; note = 2'-deoxyguanosine-3'-phosphorothioate
  modified_base 14: mod_base = OTHER; note = 5'-methyl-deoxycytidine-3'-phosphorothioate
  modified_base 15: mod_base = OTHER; note = 2'-deoxyadenosine-3'-phosphorothioate
  modified_base 16: mod_base = OTHER; note = 2'-O-methylguanosine-3'-phosphorothioate
  modified_base 17: mod_base = OTHER; note = 2'-O-methyladenosine-3'-phosphorothioate
  modified_base 18: mod_base = OTHER; note = 2'-O-methyladenosine-3'-phosphorothioate
  modified_base 19: mod_base = OTHER; note = 2'-O-methyladenosine-3'-phosphorothioate
  modified_base 20: mod_base = OTHER; note = 2'-O-methyladenosine
  misc_feature 1..5: note = RNA
  misc_feature 16..20: note = RNA
  misc_feature 6..15: note = DNA
actctcagtcatgcagaaaa

SEQ ID NO: 412 - DNA, 20 bp, synthetic construct
  source 1..20: mol_type = other DNA
  modified_base 1: mod_base = OTHER; note = 2'-O-methyladenosine-3'-phosphorothioate
  modified_base 2: mod_base = OTHER; note = 2'-O-methyladenosine-3'-phosphorothioate
  modified_base 3: mod_base = OTHER; note = 2'-O-methylcytidine-3'-phosphorothioate
  modified_base 4: mod_base = OTHER; note = 2'-O-methyladenosine-3'-phosphorothioate
  modified_base 5: mod_base = OTHER; note = 2'-O-methylcytidine-3'-phosphorothioate
  modified_base 6: mod_base = OTHER; note = 2'-deoxythymidine-3'-phosphorothioate
  modified_base 7: mod_base = OTHER; note = 2'-deoxyguanosine-3'-phosphorothioate
  modified_base 8: mod_base = OTHER; note = 2'-deoxyadenosine-3'-phosphorothioate
  modified_base 9: mod_base = OTHER; note = 2'-deoxyguanosine-3'-phosphorothioate
  modified_base 10: mod_base = OTHER; note = 2'-deoxyadenosine-3'-phosphorothioate
  modified_base 11: mod_base = OTHER; note = 5'-methyl-deoxycytidine-3'-phosphorothioate
  modified_base 12: mod_base = OTHER; note = 2'-deoxythymidine-3'-phosphorothioate
  modified_base 13: mod_base = OTHER; note = 5'-methyl-deoxycytidine-3'-phosphorothioate
  modified_base 14: mod_base = OTHER; note = 2'-deoxythymidine-3'-phosphorothioate
  modified_base 15: mod_base = OTHER; note = 5'-methyl-deoxycytidine-3'-phosphorothioate
  modified_base 16: mod_base = OTHER; note = 2'-O-methyladenosine-3'-phosphorothioate
  modified_base 17: mod_base = OTHER; note = 2'-O-methylguanosine-3'-phosphorothioate
  modified_base 18: mod_base = OTHER; note = 2'-O-methyluridine-3'-phosphorothioate
  modified_base 19: mod_base = OTHER; note = 2'-O-methylcytidine-3'-phosphorothioate
  modified_base 20: mod_base = OTHER; note = 2'-O-methyladenosine
  misc_feature 1..5: note = RNA
  misc_feature 16..20: note = RNA
  misc_feature 6..15: note = DNA
aacactgagactctcagtca

SEQ ID NO: 413 - DNA, 20 bp, synthetic construct
  source 1..20: mol_type = other DNA
  modified_base 1: mod_base = OTHER; note = 2'-O-methyladenosine-3'-phosphorothioate
  modified_base 2: mod_base = OTHER; note = 2'-O-methylcytidine-3'-phosphorothioate
  modified_base 3: mod_base = OTHER; note = 2'-O-methyluridine-3'-phosphorothioate
  modified_base 4: mod_base = OTHER; note = 2'-O-methylguanosine-3'-phosphorothioate
  modified_base 5: mod_base = OTHER; note = 2'-O-methyluridine-3'-phosphorothioate
  modified_base 6: mod_base = OTHER; note = 5'-methyl-deoxycytidine-3'-phosphorothioate
  modified_base 7: mod_base = OTHER; note = 5'-methyl-deoxycytidine-3'-phosphorothioate
  modified_base 8: mod_base = OTHER; note = 5'-methyl-deoxycytidine-3'-phosphorothioate
  modified_base 9: mod_base = OTHER; note = 2'-deoxyguanosine-3'-phosphorothioate
  modified_base 10: mod_base = OTHER; note = 2'-deoxythymidine-3'-phosphorothioate
  modified_base 11: mod_base = OTHER; note = 2'-deoxythymidine-3'-phosphorothioate
  modified_base 12: mod_base = OTHER; note = 5'-methyl-deoxycytidine-3'-phosphorothioate
  modified_base 13: mod_base = OTHER; note = 5'-methyl-deoxycytidine-3'-phosphorothioate
  modified_base 14: mod_base = OTHER; note = 2'-deoxyadenosine-3'-phosphorothioate
  modified_base 15: mod_base = OTHER; note = 2'-deoxyadenosine-3'-phosphorothioate
  modified_base 16: mod_base = OTHER; note = 2'-O-methylcytidine-3'-phosphorothioate
  modified_base 17: mod_base = OTHER; note = 2'-O-methyladenosine-3'-phosphorothioate
  modified_base 18: mod_base = OTHER; note = 2'-O-methylcytidine-3'-phosphorothioate
  modified_base 19: mod_base = OTHER; note = 2'-O-methyluridine-3'-phosphorothioate
  modified_base 20: mod_base = OTHER; note = 2'-O-methylguanosine
  misc_feature 1..5: note = RNA
  misc_feature 16..20: note = RNA
  misc_feature 6..15: note = DNA
actgtcccgttccaacactg

SEQ ID NO: 414 - DNA, 20 bp, synthetic construct
  source 1..20: mol_type = other DNA
  modified_base 1: mod_base = OTHER; note = 2'-O-methyladenosine-3'-phosphorothioate
  modified_base 2: mod_base = OTHER; note = 2'-O-methyluridine-3'-phosphorothioate
  modified_base 3: mod_base = OTHER; note = 2'-O-methyladenosine-3'-phosphorothioate
  modified_base 4: mod_base = OTHER; note = 2'-O-methylcytidine-3'-phosphorothioate
  modified_base 5: mod_base = OTHER; note = 2'-O-methyladenosine-3'-phosphorothioate
  modified_base 6: mod_base = OTHER; note = 2'-deoxythymidine-3'-phosphorothioate
  modified_base 7: mod_base = OTHER; note = 2'-deoxyadenosine-3'-phosphorothioate
  modified_base 8: mod_base = OTHER; note = 2'-deoxyadenosine-3'-phosphorothioate
  modified_base 9: mod_base = OTHER; note = 2'-deoxyadenosine-3'-phosphorothioate
  modified_base 10: mod_base = OTHER; note = 2'-deoxythymidine-3'-phosphorothioate
  modified_base 11: mod_base = OTHER; note = 2'-deoxyadenosine-3'-phosphorothioate
  modified_base 12: mod_base = OTHER; note = 5'-methyl-deoxycytidine-3'-phosphorothioate
  modified_base 13: mod_base = OTHER; note = 2'-deoxythymidine-3'-phosphorothioate
  modified_base 14: mod_base = OTHER; note = 2'-deoxyguanosine-3'-phosphorothioate
  modified_base 15: mod_base = OTHER; note = 2'-deoxythymidine-3'-phosphorothioate
  modified_base 16: mod_base = OTHER; note = 2'-O-methylcytidine-3'-phosphorothioate
  modified_base 17: mod_base = OTHER; note = 2'-O-methylcytidine-3'-phosphorothioate
  modified_base 18: mod_base = OTHER; note = 2'-O-methylcytidine-3'-phosphorothioate
  modified_base 19: mod_base = OTHER; note = 2'-O-methylguanosine-3'-phosphorothioate
  modified_base 20: mod_base = OTHER; note = 2'-O-methyluridine
  misc_feature 1..5: note = RNA
  misc_feature 16..20: note = RNA
  misc_feature 6..15: note = DNA
atacataaatactgtcccgt

SEQ ID NO: 415 - DNA, 20 bp, synthetic construct
  source 1..20: mol_type = other DNA
  modified_base 1: mod_base = OTHER; note = 2'-O-methyladenosine-3'-phosphorothioate
  modified_base 2: mod_base = OTHER; note = 2'-O-methylguanosine-3'-phosphorothioate
  modified_base 3: mod_base = OTHER; note = 2'-O-methylguanosine-3'-phosphorothioate
  modified_base 4: mod_base = OTHER; note = 2'-O-methyladenosine-3'-phosphorothioate
  modified_base 5: mod_base = OTHER; note = 2'-O-methyladenosine-3'-phosphorothioate
  modified_base 6: mod_base = OTHER; note = 2'-deoxyadenosine-3'-phosphorothioate
  modified_base 7: mod_base = OTHER; note = 2'-deoxyadenosine-3'-phosphorothioate
  modified_base 8: mod_base = OTHER; note = 2'-deoxyadenosine-3'-phosphorothioate
  modified_base 9: mod_base = OTHER; note = 5'-methyl-deoxycytidine-3'-phosphorothioate
  modified_base 10: mod_base = OTHER; note = 2'-deoxythymidine-3'-phosphorothioate
  modified_base 11: mod_base = OTHER; note = 5'-methyl-deoxycytidine-3'-phosphorothioate
  modified_base 12: mod_base = OTHER; note = 2'-deoxyadenosine-3'-phosphorothioate
  modified_base 13: mod_base = OTHER; note = 2'-deoxythymidine-3'-phosphorothioate
  modified_base 14: mod_base = OTHER; note = 2'-deoxyadenosine-3'-phosphorothioate
  modified_base 15: mod_base = OTHER; note = 5'-methyl-deoxycytidine-3'-phosphorothioate
  modified_base 16: mod_base = OTHER; note = 2'-O-methyladenosine-3'-phosphorothioate
  modified_base 17: mod_base = OTHER; note = 2'-O-methyluridine-3'-phosphorothioate
  modified_base 18: mod_base = OTHER; note = 2'-O-methyladenosine-3'-phosphorothioate
  modified_base 19: mod_base = OTHER; note = 2'-O-methyladenosine-3'-phosphorothioate
  modified_base 20: mod_base = OTHER; note = 2'-O-methyladenosine
  misc_feature 1..5: note = RNA
  misc_feature 16..20: note = RNA
  misc_feature 6..15: note = DNA
aggaaaaactcatacataaa

SEQ ID NO: 416 - DNA, 20 bp, synthetic construct
  source 1..20: mol_type = other DNA
  modified_base 1: mod_base = OTHER; note = 2'-O-methylcytidine-3'-phosphorothioate
  modified_base 2: mod_base = OTHER; note = 2'-O-methyluridine-3'-phosphorothioate
  modified_base 3: mod_base = OTHER; note = 2'-O-methylcytidine-3'-phosphorothioate
  modified_base 4: mod_base = OTHER; note = 2'-O-methyladenosine-3'-phosphorothioate
  modified_base 5: mod_base = OTHER; note = 2'-O-methyladenosine-3'-phosphorothioate
  modified_base 6: mod_base = OTHER; note = 2'-deoxyadenosine-3'-phosphorothioate
  modified_base 7: mod_base = OTHER; note = 2'-deoxyadenosine-3'-phosphorothioate
  modified_base 8: mod_base = OTHER; note = 2'-deoxythymidine-3'-phosphorothioate
  modified_base 9: mod_base = OTHER; note = 2'-deoxyadenosine-3'-phosphorothioate
  modified_base 10: mod_base = OTHER; note = 2'-deoxyadenosine-3'-phosphorothioate
  modified_base 11: mod_base = OTHER; note = 2'-deoxyadenosine-3'-phosphorothioate
  modified_base 12: mod_base = OTHER; note = 2'-deoxythymidine-3'-phosphorothioate
  modified_base 13: mod_base = OTHER; note = 2'-deoxyadenosine-3'-phosphorothioate
  modified_base 14: mod_base = OTHER; note = 2'-deoxyguanosine-3'-phosphorothioate
  modified_base 15: mod_base = OTHER; note = 2'-deoxyguanosine-3'-phosphorothioate
  modified_base 16: mod_base = OTHER; note = 2'-O-methyladenosine-3'-phosphorothioate
  modified_base 17: mod_base = OTHER; note = 2'-O-methyladenosine-3'-phosphorothioate
  modified_base 18: mod_base = OTHER; note = 2'-O-methyladenosine-3'-phosphorothioate
  modified_base 19: mod_base = OTHER; note = 2'-O-methyladenosine-3'-phosphorothioate
  modified_base 20: mod_base = OTHER; note = 2'-O-methyladenosine
  misc_feature 1..5: note = RNA
  misc_feature 16..20: note = RNA
  misc_feature 6..15: note = DNA
ctcaaaataaataggaaaaa

SEQ ID NO: 417 - DNA, 20 bp, synthetic construct
  source 1..20: mol_type = other DNA
  modified_base 1: mod_base = OTHER; note = 2'-O-methyladenosine-3'-phosphorothioate
  modified_base 2: mod_base = OTHER; note = 2'-O-methylcytidine-3'-phosphorothioate
  modified_base 3: mod_base = OTHER; note = 2'-O-methylcytidine-3'-phosphorothioate
  modified_base 4: mod_base = OTHER; note = 2'-O-methyluridine-3'-phosphorothioate
  modified_base 5: mod_base = OTHER; note = 2'-O-methylcytidine-3'-phosphorothioate
  modified_base 6: mod_base = OTHER; note = 2'-deoxyadenosine-3'-phosphorothioate
  modified_base 7: mod_base = OTHER; note = 5'-methyl-deoxycytidine-3'-phosphorothioate
  modified_base 8: mod_base = OTHER; note = 2'-deoxyadenosine-3'-phosphorothioate
  modified_base 9: mod_base = OTHER; note = 2'-deoxyguanosine-3'-phosphorothioate
  modified_base 10: mod_base = OTHER; note = 2'-deoxyadenosine-3'-phosphorothioate
  modified_base 11: mod_base = OTHER; note = 5'-methyl-deoxycytidine-3'-phosphorothioate
  modified_base 12: mod_base = OTHER; note = 2'-deoxythymidine-3'-phosphorothioate
  modified_base 13: mod_base = OTHER; note = 5'-methyl-deoxycytidine-3'-phosphorothioate
  modified_base 14: mod_base = OTHER; note = 2'-deoxyadenosine-3'-phosphorothioate
  modified_base 15: mod_base = OTHER; note = 2'-deoxyadenosine-3'-phosphorothioate
  modified_base 16: mod_base = OTHER; note = 2'-O-methyladenosine-3'-phosphorothioate
  modified_base 17: mod_base = OTHER; note = 2'-O-methyladenosine-3'-phosphorothioate
  modified_base 18: mod_base = OTHER; note = 2'-O-methyluridine-3'-phosphorothioate
  modified_base 19: mod_base = OTHER; note = 2'-O-methyladenosine-3'-phosphorothioate
  modified_base 20: mod_base = OTHER; note = 2'-O-methyladenosine
  misc_feature 1..5: note = RNA
  misc_feature 16..20: note = RNA
  misc_feature 6..15: note = DNA
acctcacagactcaaaataa

SEQ ID NO: 418 - DNA, 20 bp, synthetic construct
  source 1..20: mol_type = other DNA
  modified_base 1: mod_base = OTHER; note = 2'-O-methyladenosine-3'-phosphorothioate
  modified_base 2: mod_base = OTHER; note = 2'-O-methyluridine-3'-phosphorothioate
  modified_base 3: mod_base = OTHER; note = 2'-O-methylguanosine-3'-phosphorothioate
  modified_base 4: mod_base = OTHER; note = 2'-O-methyladenosine-3'-phosphorothioate
  modified_base 5: mod_base = OTHER; note = 2'-O-methylcytidine-3'-phosphorothioate
  modified_base 6: mod_base = OTHER; note = 2'-deoxyadenosine-3'-phosphorothioate
  modified_base 7: mod_base = OTHER; note = 2'-deoxyadenosine-3'-phosphorothioate
  modified_base 8: mod_base = OTHER; note = 2'-deoxyguanosine-3'-phosphorothioate
  modified_base 9: mod_base = OTHER; note = 2'-deoxyadenosine-3'-phosphorothioate
  modified_base 10: mod_base = OTHER; note = 2'-deoxyadenosine-3'-phosphorothioate
  modified_base 11: mod_base = OTHER; note = 2'-deoxyguanosine-3'-phosphorothioate
  modified_base 12: mod_base = OTHER; note = 2'-deoxyadenosine-3'-phosphorothioate
  modified_base 13: mod_base = OTHER; note = 5'-methyl-deoxycytidine-3'-phosphorothioate
  modified_base 14: mod_base = OTHER; note = 5'-methyl-deoxycytidine-3'-phosphorothioate
  modified_base 15: mod_base = OTHER; note = 2'-deoxythymidine-3'-phosphorothioate
  modified_base 16: mod_base = OTHER; note = 2'-O-methylcytidine-3'-phosphorothioate
  modified_base 17: mod_base = OTHER; note = 2'-O-methyladenosine-3'-phosphorothioate
  modified_base 18: mod_base = OTHER; note = 2'-O-methylcytidine-3'-phosphorothioate
  modified_base 19: mod_base = OTHER; note = 2'-O-methyladenosine-3'-phosphorothioate
  modified_base 20: mod_base = OTHER; note = 2'-O-methylguanosine
  misc_feature 1..5: note = RNA
  misc_feature 16..20: note = RNA
  misc_feature 6..15: note = DNA
atgacaagaagacctcacag

SEQ ID NO: 419 - DNA, 20 bp, synthetic construct
  source 1..20: mol_type = other DNA
  modified_base 1: mod_base = OTHER; note = 2'-O-methyladenosine-3'-phosphorothioate
  modified_base 2: mod_base = OTHER; note = 2'-O-methyladenosine-3'-phosphorothioate
  modified_base 3: mod_base = OTHER; note = 2'-O-methylcytidine-3'-phosphorothioate
  modified_base 4: mod_base = OTHER; note = 2'-O-methylcytidine-3'-phosphorothioate
  modified_base 5: mod_base = OTHER; note = 2'-O-methyladenosine-3'-phosphorothioate
  modified_base 6: mod_base = OTHER; note = 5'-methyl-deoxycytidine-3'-phosphorothioate
  modified_base 7: mod_base = OTHER; note = 2'-deoxyadenosine-3'-phosphorothioate
  modified_base 8: mod_base = OTHER; note = 5'-methyl-deoxycytidine-3'-phosphorothioate
  modified_base 9: mod_base = OTHER; note = 2'-deoxythymidine-3'-phosphorothioate
  modified_base 10: mod_base = OTHER; note = 5'-methyl-deoxycytidine-3'-phosphorothioate
  modified_base 11: mod_base = OTHER; note = 2'-deoxyadenosine-3'-phosphorothioate
  modified_base 12: mod_base = OTHER; note = 5'-methyl-deoxycytidine-3'-phosphorothioate
  modified_base 13: mod_base = OTHER; note = 2'-deoxyadenosine-3'-phosphorothioate
  modified_base 14: mod_base = OTHER; note = 2'-deoxythymidine-3'-phosphorothioate
  modified_base 15: mod_base = OTHER; note = 2'-deoxyguanosine-3'-phosphorothioate
  modified_base 16: mod_base = OTHER; note = 2'-O-methyladenosine-3'-phosphorothioate
  modified_base 17: mod_base = OTHER; note = 2'-O-methylcytidine-3'-phosphorothioate
  modified_base 18: mod_base = OTHER; note = 2'-O-methyladenosine-3'-phosphorothioate
  modified_base 19: mod_base = OTHER; note = 2'-O-methyladenosine-3'-phosphorothioate
  modified_base 20: mod_base = OTHER; note = 2'-O-methylguanosine
  misc_feature 1..5: note = RNA
  misc_feature 16..20: note = RNA
  misc_feature 6..15: note = DNA
aaccacactcacatgacaag

SEQ ID NO: 420 - DNA, 20 bp, synthetic construct
  source 1..20: mol_type = other DNA
  modified_base 1: mod_base = OTHER; note = 2'-O-methyladenosine-3'-phosphorothioate
  modified_base 2: mod_base = OTHER; note = 2'-O-methyladenosine-3'-phosphorothioate
  modified_base 3: mod_base = OTHER; note = 2'-O-methyluridine-3'-phosphorothioate
  modified_base 4: mod_base = OTHER; note = 2'-O-methylcytidine-3'-phosphorothioate
  modified_base 5: mod_base = OTHER; note = 2'-O-methyladenosine-3'-phosphorothioate
  modified_base 6: mod_base = OTHER; note = 2'-deoxythymidine-3'-phosphorothioate
  modified_base 7: mod_base = OTHER; note = 2'-deoxythymidine-3'-phosphorothioate
  modified_base 8: mod_base = OTHER; note = 5'-methyl-deoxycytidine-3'-phosphorothioate
  modified_base 9: mod_base = OTHER; note = 2'-deoxyadenosine-3'-phosphorothioate
  modified_base 10: mod_base = OTHER; note = 5'-methyl-deoxycytidine-3'-phosphorothioate
  modified_base 11: mod_base = OTHER; note = 2'-deoxyadenosine-3'-phosphorothioate
  modified_base 12: mod_base = OTHER; note = 2'-deoxyadenosine-3'-phosphorothioate
  modified_base 13: mod_base = OTHER; note = 5'-methyl-deoxycytidine-3'-phosphorothioate
  modified_base 14: mod_base = OTHER; note = 5'-methyl-deoxycytidine-3'-phosphorothioate
  modified_base 15: mod_base = OTHER; note = 2'-deoxyadenosine-3'-phosphorothioate
  modified_base 16: mod_base = OTHER; note = 2'-O-methylcytidine-3'-phosphorothioate
  modified_base 17: mod_base = OTHER; note = 2'-O-methyladenosine-3'-phosphorothioate
  modified_base 18: mod_base = OTHER; note = 2'-O-methylcytidine-3'-phosphorothioate
  modified_base 19: mod_base = OTHER; note = 2'-O-methyluridine-3'-phosphorothioate
  modified_base 20: mod_base = OTHER; note = 2'-O-methylcytidine
  misc_feature 1..5: note = RNA
  misc_feature 16..20: note = RNA
  misc_feature 6..15: note = DNA
aatcattcacaaccacactc

SEQ ID NO: 421 - DNA, 20 bp, synthetic construct
  source 1..20: mol_type = other DNA
  modified_base 1: mod_base = OTHER; note = 2'-O-methyladenosine-3'-phosphorothioate
  modified_base 2: mod_base = OTHER; note = 2'-O-methyluridine-3'-phosphorothioate
  modified_base 3: mod_base = OTHER; note = 2'-O-methylcytidine-3'-phosphorothioate
  modified_base 4: mod_base = OTHER; note = 2'-O-methyluridine-3'-phosphorothioate
  modified_base 5: mod_base = OTHER; note = 2'-O-methyluridine-3'-phosphorothioate
  modified_base 6: mod_base = OTHER; note = 5'-methyl-deoxycytidine-3'-phosphorothioate
  modified_base 7: mod_base = OTHER; note = 2'-deoxyadenosine-3'-phosphorothioate
  modified_base 8: mod_base = OTHER; note = 2'-deoxyadenosine-3'-phosphorothioate
  modified_base 9: mod_base = OTHER; note = 2'-deoxyadenosine-3'-phosphorothioate
  modified_base 10: mod_base = OTHER; note = 2'-deoxyadenosine-3'-phosphorothioate
  modified_base 11: mod_base = OTHER; note = 2'-deoxyguanosine-3'-phosphorothioate
  modified_base 12: mod_base = OTHER; note = 2'-deoxyadenosine-3'-phosphorothioate
  modified_base 13: mod_base = OTHER; note = 2'-deoxyadenosine-3'-phosphorothioate
  modified_base 14: mod_base = OTHER; note = 2'-deoxyadenosine-3'-phosphorothioate
  modified_base 15: mod_base = OTHER; note = 2'-deoxythymidine-3'-phosphorothioate
  modified_base 16: mod_base = OTHER; note = 2'-O-methylcytidine-3'-phosphorothioate
  modified_base 17: mod_base = OTHER; note = 2'-O-methyladenosine-3'-phosphorothioate
  modified_base 18: mod_base = OTHER; note = 2'-O-methyluridine-3'-phosphorothioate
  modified_base 19: mod_base = OTHER; note = 2'-O-methyluridine-3'-phosphorothioate
  modified_base 20: mod_base = OTHER; note = 2'-O-methylcytidine
  misc_feature 1..5: note = RNA
  misc_feature 16..20: note = RNA
  misc_feature 6..15: note = DNA
atcttcaaaagaaatcattc

SEQ ID NO: 422 - DNA, 20 bp, synthetic construct
  source 1..20: mol_type = other DNA
  modified_base 1: mod_base = OTHER; note = 2'-O-methyladenosine-3'-phosphorothioate
  modified_base 2: mod_base = OTHER; note = 2'-O-methylcytidine-3'-phosphorothioate
  modified_base 3: mod_base = OTHER; note = 2'-O-methyluridine-3'-phosphorothioate
  modified_base 4: mod_base = OTHER; note = 2'-O-methyladenosine-3'-phosphorothioate
  modified_base 5: mod_base = OTHER; note = 2'-O-methylcytidine-3'-phosphorothioate
  modified_base 6: mod_base = OTHER; note = 2'-deoxyadenosine-3'-phosphorothioate
  modified_base 7: mod_base = OTHER; note = 2'-deoxyadenosine-3'-phosphorothioate
  modified_base 8: mod_base = OTHER; note = 2'-deoxythymidine-3'-phosphorothioate
  modified_base 9: mod_base = OTHER; note = 2'-deoxyadenosine-3'-phosphorothioate
  modified_base 10: mod_base = OTHER; note = 2'-deoxythymidine-3'-phosphorothioate
  modified_base 11: mod_base = OTHER; note = 2'-deoxyadenosine-3'-phosphorothioate
  modified_base 12: mod_base = OTHER; note = 2'-deoxythymidine-3'-phosphorothioate
  modified_base 13: mod_base = OTHER; note = 5'-methyl-deoxycytidine-3'-phosphorothioate
  modified_base 14: mod_base = OTHER; note = 2'-deoxythymidine-3'-phosphorothioate
  modified_base 15: mod_base = OTHER; note = 2'-deoxythymidine-3'-phosphorothioate
  modified_base 16: mod_base = OTHER; note = 2'-O-methylcytidine-3'-phosphorothioate
  modified_base 17: mod_base = OTHER; note = 2'-O-methyladenosine-3'-phosphorothioate
  modified_base 18: mod_base = OTHER; note = 2'-O-methyladenosine-3'-phosphorothioate
  modified_base 19: mod_base = OTHER; note = 2'-O-methyladenosine-3'-phosphorothioate
  modified_base 20: mod_base = OTHER; note = 2'-O-methyladenosine
  misc_feature 1..5: note = RNA
  misc_feature 16..20: note = RNA
  misc_feature 6..15: note = DNA
actacaatatatcttcaaaa

SEQ ID NO: 423 - DNA, 20 bp, synthetic construct
  source 1..20: mol_type = other DNA
  modified_base 1: mod_base = OTHER; note = 2'-O-methyladenosine-3'-phosphorothioate
  modified_base 2: mod_base = OTHER; note = 2'-O-methyluridine-3'-phosphorothioate
  modified_base 3: mod_base = OTHER; note = 2'-O-methyluridine-3'-phosphorothioate
  modified_base 4: mod_base = OTHER; note = 2'-O-methylguanosine-3'-phosphorothioate
  modified_base 5: mod_base = OTHER; note = 2'-O-methyluridine-3'-phosphorothioate
  modified_base 6: mod_base = OTHER; note = 2'-deoxyadenosine-3'-phosphorothioate
  modified_base 7: mod_base = OTHER; note = 2'-deoxyadenosine-3'-phosphorothioate
  modified_base 8: mod_base = OTHER; note = 5'-methyl-deoxycytidine-3'-phosphorothioate
  modified_base 9: mod_base = OTHER; note = 2'-deoxyadenosine-3'-phosphorothioate
  modified_base 10: mod_base = OTHER; note = 2'-deoxythymidine-3'-phosphorothioate
  modified_base 11: mod_base = OTHER; note = 5'-methyl-deoxycytidine-3'-phosphorothioate
  modified_base 12: mod_base = OTHER; note = 2'-deoxythymidine-3'-phosphorothioate
  modified_base 13: mod_base = OTHER; note = 2'-deoxyadenosine-3'-phosphorothioate
  modified_base 14: mod_base = OTHER; note = 5'-methyl-deoxycytidine-3'-phosphorothioate
  modified_base 15: mod_base = OTHER; note = 2'-deoxythymidine-3'-phosphorothioate
  modified_base 16: mod_base = OTHER; note = 2'-O-methyladenosine-3'-phosphorothioate
  modified_base 17: mod_base = OTHER; note = 2'-O-methylcytidine-3'-phosphorothioate
  modified_base 18: mod_base = OTHER; note = 2'-O-methyladenosine-3'-phosphorothioate
  modified_base 19: mod_base = OTHER; note = 2'-O-methyladenosine-3'-phosphorothioate
  modified_base 20: mod_base = OTHER; note = 2'-O-methyluridine
  misc_feature 1..5: note = RNA
  misc_feature 16..20: note = RNA
  misc_feature 6..15: note = DNA
attgtaacatctactacaat

SEQ ID NO: 424 - DNA, 20 bp, synthetic construct
  source 1..20: mol_type = other DNA
  modified_base 1: mod_base = OTHER; note = 2'-O-methyluridine-3'-phosphorothioate
  modified_base 2: mod_base = OTHER; note = 2'-O-methylguanosine-3'-phosphorothioate
  modified_base 3: mod_base = OTHER; note = 2'-O-methylguanosine-3'-phosphorothioate
  modified_base 4: mod_base = OTHER; note = 2'-O-methylcytidine-3'-phosphorothioate
  modified_base 5: mod_base = OTHER; note = 2'-O-methylguanosine-3'-phosphorothioate
  modified_base 6: mod_base = OTHER; note = 2'-deoxyadenosine-3'-phosphorothioate
  modified_base 7: mod_base = OTHER; note = 5'-methyl-deoxycytidine-3'-phosphorothioate
  modified_base 8: mod_base = OTHER; note = 2'-deoxyadenosine-3'-phosphorothioate
  modified_base 9: mod_base = OTHER; note = 2'-deoxyadenosine-3'-phosphorothioate
  modified_base 10: mod_base = OTHER; note = 2'-deoxyadenosine-3'-phosphorothioate
  modified_base 11: mod_base = OTHER; note = 2'-deoxyadenosine-3'-phosphorothioate
  modified_base 12: mod_base = OTHER; note = 2'-deoxythymidine-3'-phosphorothioate
  modified_base 13: mod_base = OTHER; note = 2'-deoxythymidine-3'-phosphorothioate
  modified_base 14: mod_base = OTHER; note = 2'-deoxyguanosine-3'-phosphorothioate
  modified_base 15: mod_base = OTHER; note = 2'-deoxythymidine-3'-phosphorothioate
  modified_base 16: mod_base = OTHER; note = 2'-O-methyladenosine-3'-phosphorothioate
  modified_base 17: mod_base = OTHER; note = 2'-O-methyladenosine-3'-phosphorothioate
  modified_base 18: mod_base = OTHER; note = 2'-O-methylcytidine-3'-phosphorothioate
  modified_base 19: mod_base = OTHER; note = 2'-O-methyladenosine-3'-phosphorothioate
  modified_base 20: mod_base = OTHER; note = 2'-O-methyluridine
  misc_feature 1..5: note = RNA
  misc_feature 16..20: note = RNA
  misc_feature 6..15: note = DNA
tggcgacaaaattgtaacat

SEQ ID NO: 425 - DNA, 20 bp, synthetic construct
  source 1..20: mol_type = other DNA
  modified_base 1: mod_base = OTHER; note = 2'-O-methyladenosine-3'-phosphorothioate
  modified_base 2: mod_base = OTHER; note = 2'-O-methyladenosine-3'-phosphorothioate
  modified_base 3: mod_base = OTHER; note = 2'-O-methylguanosine-3'-phosphorothioate
  modified_base 4: mod_base = OTHER; note = 2'-O-methyluridine-3'-phosphorothioate
  modified_base 5: mod_base = OTHER; note = 2'-O-methyluridine-3'-phosphorothioate
  modified_base 6: mod_base = OTHER; note = 2'-deoxythymidine-3'-phosphorothioate
  modified_base 7: mod_base = OTHER; note = 2'-deoxyadenosine-3'-phosphorothioate
  modified_base 8: mod_base = OTHER; note = 2'-deoxyguanosine-3'-phosphorothioate
  modified_base 9: mod_base = OTHER; note = 2'-deoxythymidine-3'-phosphorothioate
  modified_base 10: mod_base = OTHER; note = 2'-deoxythymidine-3'-phosphorothioate
  modified_base 11: mod_base = OTHER; note = 2'-deoxythymidine-3'-phosphorothioate
  modified_base 12: mod_base = OTHER; note = 2'-deoxyguanosine-3'-phosphorothioate
  modified_base 13: mod_base = OTHER; note = 2'-deoxyguanosine-3'-phosphorothioate
  modified_base 14: mod_base = OTHER; note = 5'-methyl-deoxycytidine-3'-phosphorothioate
  modified_base 15: mod_base = OTHER; note = 2'-deoxyguanosine-3'-phosphorothioate
  modified_base 16: mod_base = OTHER; note = 2'-O-methyladenosine-3'-phosphorothioate
  modified_base 17: mod_base = OTHER; note = 2'-O-methylcytidine-3'-phosphorothioate
  modified_base 18: mod_base = OTHER; note = 2'-O-methyladenosine-3'-phosphorothioate
  modified_base 19: mod_base = OTHER; note = 2'-O-methyladenosine-3'-phosphorothioate
  modified_base 20: mod_base = OTHER; note = 2'-O-methyladenosine
  misc_feature 1..5: note = RNA
  misc_feature 16..20: note = RNA
  misc_feature 6..15: note = DNA
aagtttagtttggcgacaaa

SEQ ID NO: 426 - DNA, 20 bp, synthetic construct
  source 1..20: mol_type = other DNA
  modified_base 1: mod_base = OTHER; note = 2'-O-methyladenosine-3'-phosphorothioate
  modified_base 2: mod_base = OTHER; note = 2'-O-methyluridine-3'-phosphorothioate
  modified_base 3: mod_base = OTHER; note = 2'-O-methylcytidine-3'-phosphorothioate
  modified_base 4: mod_base = OTHER; note = 2'-O-methyladenosine-3'-phosphorothioate
  modified_base 5: mod_base = OTHER; note = 2'-O-methyluridine-3'-phosphorothioate
  modified_base 6: mod_base = OTHER; note = 2'-deoxythymidine-3'-phosphorothioate
  modified_base 7: mod_base = OTHER; note = 2'-deoxyadenosine-3'-phosphorothioate
  modified_base 8: mod_base = OTHER; note = 2'-deoxyadenosine-3'-phosphorothioate
  modified_base 9: mod_base = OTHER; note = 2'-deoxyguanosine-3'-phosphorothioate
  modified_base 10: mod_base = OTHER; note = 5'-methyl-deoxycytidine-3'-phosphorothioate
  modified_base 11: mod_base = OTHER; note = 2'-deoxyadenosine-3'-phosphorothioate
  modified_base 12: mod_base = OTHER; note = 2'-deoxyguanosine-3'-phosphorothioate
  modified_base 13: mod_base = OTHER; note = 5'-methyl-deoxycytidine-3'-phosphorothioate
  modified_base 14: mod_base = OTHER; note = 2'-deoxyadenosine-3'-phosphorothioate
  modified_base 15: mod_base = OTHER; note = 2'-deoxyadenosine-3'-phosphorothioate
  modified_base 16: mod_base = OTHER; note = 2'-O-methylguanosine-3'-phosphorothioate
  modified_base 17: mod_base = OTHER; note = 2'-O-methyluridine-3'-phosphorothioate
  modified_base 18: mod_base = OTHER; note = 2'-O-methyluridine-3'-phosphorothioate
  modified_base 19: mod_base = OTHER; note = 2'-O-methyluridine-3'-phosphorothioate
  modified_base 20: mod_base = OTHER; note = 2'-O-methyladenosine
  misc_feature 1..5: note = RNA
  misc_feature 16..20: note = RNA
  misc_feature 6..15: note = DNA
atcattaagcagcaagttta

SEQ ID NO: 427 - DNA, 20 bp, synthetic construct
  source 1..20: mol_type = other DNA
  modified_base 1: mod_base = OTHER; note = 2'-O-methylguanosine-3'-phosphorothioate
  modified_base 2: mod_base = OTHER; note = 2'-O-methyladenosine-3'-phosphorothioate
  modified_base 3: mod_base = OTHER; note = 2'-O-methyluridine-3'-phosphorothioate
  modified_base 4: mod_base = OTHER; note = 2'-O-methylguanosine-3'-phosphorothioate
  modified_base 5: mod_base = OTHER; note = 2'-O-methyluridine-3'-phosphorothioate
  modified_base 6: mod_base = OTHER; note = 2'-deoxyguanosine-3'-phosphorothioate
  modified_base 7: mod_base = OTHER; note = 2'-deoxyadenosine-3'-phosphorothioate
  modified_base 8: mod_base = OTHER; note = 2'-deoxyguanosine-3'-phosphorothioate
  modified_base 9: mod_base = OTHER; note = 5'-methyl-deoxycytidine-3'-phosphorothioate
  modified_base 10: mod_base = OTHER; note = 2'-deoxyadenosine-3'-phosphorothioate
  modified_base 11: mod_base = OTHER; note = 2'-deoxyadenosine-3'-phosphorothioate
  modified_base 12: mod_base = OTHER; note = 2'-deoxyadenosine-3'-phosphorothioate
  modified_base 13: mod_base = OTHER; note = 2'-deoxythymidine-3'-phosphorothioate
  modified_base 14: mod_base = OTHER; note = 5'-methyl-deoxycytidine-3'-phosphorothioate
  modified_base 15: mod_base = OTHER; note = 2'-deoxyadenosine-3'-phosphorothioate
  modified_base 16: mod_base = OTHER; note = 2'-O-methyluridine-3'-phosphorothioate
  modified_base 17: mod_base = OTHER; note = 2'-O-methyluridine-3'-phosphorothioate
  modified_base 18: mod_base = OTHER; note = 2'-O-methyladenosine-3'-phosphorothioate
  modified_base 19: mod_base = OTHER; note = 2'-O-methyladenosine-3'-phosphorothioate
  modified_base 20: mod_base = OTHER; note = 2'-O-methylguanosine
  misc_feature 1..5: note = RNA
  misc_feature 16..20: note = RNA
  misc_feature 6..15: note = DNA
gatgtgagcaaatcattaag

SEQ ID NO: 428 - DNA, 20 bp, synthetic construct
  source 1..20: mol_type = other DNA
  modified_base 1: mod_base = OTHER; note = 2'-O-methyladenosine-3'-phosphorothioate
  modified_base 2: mod_base = OTHER; note = 2'-O-methyluridine-3'-phosphorothioate
  modified_base 3: mod_base = OTHER; note = 2'-O-methylguanosine-3'-phosphorothioate
  modified_base 4: mod_base = OTHER; note = 2'-O-methyluridine-3'-phosphorothioate
  modified_base 5: mod_base = OTHER; note = 2'-O-methyluridine-3'-phosphorothioate
  modified_base 6: mod_base = OTHER; note = 2'-deoxythymidine-3'-phosphorothioate
  modified_base 7: mod_base = OTHER; note = 2'-deoxythymidine-3'-phosphorothioate
  modified_base 8: mod_base = OTHER; note = 2'-deoxyadenosine-3'-phosphorothioate
  modified_base 9: mod_base = OTHER; note = 5'-methyl-deoxycytidine-3'-phosphorothioate
  modified_base 10: mod_base = OTHER; note = 2'-deoxythymidine-3'-phosphorothioate
  modified_base 11: mod_base = OTHER; note = 2'-deoxyadenosine-3'-phosphorothioate
  modified_base 12: mod_base = OTHER; note = 2'-deoxyguanosine-3'-phosphorothioate
  modified_base 13: mod_base = OTHER; note = 2'-deoxyadenosine-3'-phosphorothioate
  modified_base 14: mod_base = OTHER; note = 2'-deoxythymidine-3'-phosphorothioate
  modified_base 15: mod_base = OTHER; note = 2'-deoxyguanosine-3'-phosphorothioate
  modified_base 16: mod_base = OTHER; note = 2'-O-methyluridine-3'-phosphorothioate
  modified_base 17: mod_base = OTHER; note = 2'-O-methylguanosine-3'-phosphorothioate
  modified_base 18: mod_base = OTHER; note = 2'-O-methyladenosine-3'-phosphorothioate
  modified_base 19: mod_base = OTHER; note = 2'-O-methylguanosine-3'-phosphorothioate
  modified_base 20: mod_base = OTHER; note = 2'-O-methylcytidine
  misc_feature 1..5: note = RNA
  misc_feature 16..20: note = RNA
  misc_feature 6..15: note = DNA
atgttttactagatgtgagc

SEQ ID NO: 429 - DNA, 20 bp, synthetic construct
  source 1..20: mol_type = other DNA
  modified_base 1: mod_base = OTHER; note = 2'-O-methyladenosine-3'-phosphorothioate
  modified_base 2: mod_base = OTHER; note = 2'-O-methylcytidine-3'-phosphorothioate
  modified_base 3: mod_base = OTHER; note = 2'-O-methyladenosine-3'-phosphorothioate
  modified_base 4: mod_base = OTHER; note = 2'-O-methyladenosine-3'-phosphorothioate
  modified_base 5: mod_base = OTHER; note = 2'-O-methyladenosine-3'-phosphorothioate
  modified_base 6: mod_base = OTHER; note = 2'-deoxythymidine-3'-phosphorothioate
  modified_base 7: mod_base = OTHER; note = 2'-deoxyadenosine-3'-phosphorothioate
  modified_base 8: mod_base = OTHER; note = 5'-methyl-deoxycytidine-3'-phosphorothioate
  modified_base 9: mod_base = OTHER; note = 2'-deoxythymidine-3'-phosphorothioate
  modified_base 10: mod_base = OTHER; note = 5'-methyl-deoxycytidine-3'-phosphorothioate
  modified_base 11: mod_base = OTHER; note = 5'-methyl-deoxycytidine-3'-phosphorothioate
  modified_base 12: mod_base = OTHER; note = 2'-deoxyadenosine-3'-phosphorothioate
  modified_base 13: mod_base = OTHER; note = 2'-deoxythymidine-3'-phosphorothioate
  modified_base 14: mod_base = OTHER; note = 2'-deoxyguanosine-3'-phosphorothioate
  modified_base 15: mod_base = OTHER; note = 2'-deoxythymidine-3'-phosphorothioate
  modified_base 16: mod_base = OTHER; note = 2'-O-methyluridine-3'-phosphorothioate
  modified_base 17: mod_base = OTHER; note = 2'-O-methyluridine-3'-phosphorothioate
  modified_base 18: mod_base = OTHER; note = 2'-O-methyluridine-3'-phosphorothioate
  modified_base 19: mod_base = OTHER; note = 2'-O-methyladenosine-3'-phosphorothioate
  modified_base 20: mod_base = OTHER; note = 2'-O-methylcytidine
  misc_feature 1..5: note = RNA
  misc_feature 16..20: note = RNA
  misc_feature 6..15: note = DNA
acaaatactccatgttttac

SEQ ID NO: 430 - DNA, 20 bp, synthetic construct
  source 1..20: mol_type = other DNA
  modified_base 1: mod_base = OTHER; note = 2'-O-methyladenosine-3'-phosphorothioate
  modified_base 2: mod_base = OTHER; note = 2'-O-methyladenosine-3'-phosphorothioate
  modified_base 3: mod_base = OTHER; note = 2'-O-methylguanosine-3'-phosphorothioate
  modified_base 4: mod_base = OTHER; note = 2'-O-methylcytidine-3'-phosphorothioate
  modified_base 5: mod_base = OTHER; note = 2'-O-methyladenosine-3'-phosphorothioate
  modified_base 6: mod_base = OTHER; note = 5'-methyl-deoxycytidine-3'-phosphorothioate
  modified_base 7: mod_base = OTHER; note = 5'-methyl-deoxycytidine-3'-phosphorothioate
  modified_base 8: mod_base = OTHER; note = 2'-deoxythymidine-3'-phosphorothioate
  modified_base 9: mod_base = OTHER; note = 2'-deoxythymidine-3'-phosphorothioate
  modified_base 10: mod_base = OTHER; note = 2'-deoxyadenosine-3'-phosphorothioate
  modified_base 11: mod_base = OTHER; note = 5'-methyl-deoxycytidine-3'-phosphorothioate
  modified_base 12: mod_base = OTHER; note = 2'-deoxyadenosine-3'-phosphorothioate
  modified_base 13: mod_base = OTHER; note = 2'-deoxyadenosine-3'-phosphorothioate
  modified_base 14: mod_base = OTHER; note = 2'-deoxyadenosine-3'-phosphorothioate
  modified_base 15: mod_base = OTHER; note = 2'-deoxythymidine-3'-phosphorothioate
  modified_base 16: mod_base = OTHER; note = 2'-O-methyladenosine-3'-phosphorothioate
  modified_base 17: mod_base = OTHER; note = 2'-O-methylcytidine-3'-phosphorothioate
  modified_base 18: mod_base = OTHER; note = 2'-O-methyluridine-3'-phosphorothioate
  modified_base 19: mod_base = OTHER; note = 2'-O-methylcytidine-3'-phosphorothioate
  modified_base 20: mod_base = OTHER; note = 2'-O-methylcytidine
  misc_feature 1..5: note = RNA
  misc_feature 16..20: note = RNA
  misc_feature 6..15: note = DNA
aagcaccttacaaatactcc

SEQ ID NO: 431 - DNA, 20 bp, synthetic construct
  source 1..20: mol_type = other DNA
  modified_base 1: mod_base = OTHER; note = 2'-O-methyluridine-3'-phosphorothioate
  modified_base 2: mod_base = OTHER; note = 2'-O-methyladenosine-3'-phosphorothioate
  modified_base 3: mod_base = OTHER; note = 2'-O-methylguanosine-3'-phosphorothioate
  modified_base 4: mod_base = OTHER; note = 2'-O-methyladenosine-3'-phosphorothioate
  modified_base 5: mod_base = OTHER; note = 2'-O-methylguanosine-3'-phosphorothioate
  modified_base 6: mod_base = OTHER; note = 2'-deoxyguanosine-3'-phosphorothioate
  modified_base 7: mod_base = OTHER; note = 2'-deoxyadenosine-3'-phosphorothioate
  modified_base 8: mod_base = OTHER; note = 2'-deoxyguanosine-3'-phosphorothioate
  modified_base 9: mod_base = OTHER; note = 2'-deoxyadenosine-3'-phosphorothioate
  modified_base 10: mod_base = OTHER; note = 5'-methyl-deoxycytidine-3'-phosphorothioate
  modified_base 11: mod_base = OTHER; note = 5'-methyl-deoxycytidine-3'-phosphorothioate
  modified_base 12: mod_base = OTHER; note = 2'-deoxyadenosine-3'-phosphorothioate
  modified_base 13: mod_base = OTHER; note = 2'-deoxyadenosine-3'-phosphorothioate
  modified_base 14: mod_base = OTHER; note = 2'-deoxyguanosine-3'-phosphorothioate
  modified_base 15: mod_base = OTHER; note = 5'-methyl-deoxycytidine-3'-phosphorothioate
  modified_base 16: mod_base = OTHER; note = 2'-O-methyladenosine-3'-phosphorothioate
  modified_base 17: mod_base = OTHER; note = 2'-O-methylcytidine-3'-phosphorothioate
  modified_base 18: mod_base = OTHER; note = 2'-O-methylcytidine-3'-phosphorothioate
  modified_base 19: mod_base = OTHER; note = 2'-O-methyluridine-3'-phosphorothioate
  modified_base 20: mod_base = OTHER; note = 2'-O-methyluridine
  misc_feature 1..5: note = RNA
  misc_feature 16..20: note = RNA
  misc_feature 6..15: note = DNA
tagaggagaccaagcacctt

SEQ ID NO: 432 - DNA, 20 bp, synthetic construct
  source 1..20: mol_type = other DNA
  modified_base 1: mod_base = OTHER; note = 2'-O-methyladenosine-3'-phosphorothioate
  modified_base 2: mod_base = OTHER; note = 2'-O-methyluridine-3'-phosphorothioate
  modified_base 3: mod_base = OTHER; note = 2'-O-methyladenosine-3'-phosphorothioate
  modified_base 4: mod_base = OTHER; note = 2'-O-methylcytidine-3'-phosphorothioate
  modified_base 5: mod_base = OTHER; note = 2'-O-methyluridine-3'-phosphorothioate
  modified_base 6: mod_base = OTHER; note = 2'-deoxythymidine-3'-phosphorothioate
  modified_base 7: mod_base = OTHER; note = 2'-deoxyguanosine-3'-phosphorothioate
  modified_base 8: mod_base = OTHER; note = 2'-deoxythymidine-3'-phosphorothioate
  modified_base 9: mod_base = OTHER; note = 2'-deoxyadenosine-3'-phosphorothioate
  modified_base 10: mod_base = OTHER; note = 2'-deoxyguanosine-3'-phosphorothioate
  modified_base 11: mod_base = OTHER; note = 2'-deoxythymidine-3'-phosphorothioate
  modified_base 12: mod_base = OTHER; note = 2'-deoxythymidine-3'-phosphorothioate
  modified_base 13: mod_base = OTHER; note = 2'-deoxyadenosine-3'-phosphorothioate
  modified_base 14: mod_base = OTHER; note = 2'-deoxythymidine-3'-phosphorothioate
  modified_base 15: mod_base = OTHER; note = 2'-deoxyadenosine-3'-phosphorothioate
  modified_base 16: mod_base = OTHER; note = 2'-O-methylguanosine-3'-phosphorothioate
  modified_base 17: mod_base = OTHER; note = 2'-O-methyladenosine-3'-phosphorothioate
  modified_base 18: mod_base = OTHER; note = 2'-O-methylguanosine-3'-phosphorothioate
  modified_base 19: mod_base = OTHER; note = 2'-O-methylguanosine-3'-phosphorothioate
  modified_base 20: mod_base = OTHER; note = 2'-O-methyladenosine
  misc_feature 1..5: note = RNA
  misc_feature 16..20: note = RNA
  misc_feature 6..15: note = DNA
atacttgtagttatagagga

SEQ ID NO: 433 - DNA, 20 bp, synthetic construct
  source 1..20: mol_type = other DNA
  modified_base 1: mod_base = OTHER; note = 2'-O-methylguanosine-3'-phosphorothioate
  modified_base 2: mod_base = OTHER; note = 2'-O-methylcytidine-3'-phosphorothioate
  modified_base 3: mod_base = OTHER; note = 2'-O-methyluridine-3'-phosphorothioate
  modified_base 4: mod_base = OTHER; note = 2'-O-methyluridine-3'-phosphorothioate
  modified_base 5: mod_base = OTHER; note = 2'-O-methylcytidine-3'-phosphorothioate
  modified_base 6: mod_base = OTHER; note = 5'-methyl-deoxycytidine-3'-phosphorothioate
  modified_base 7: mod_base = OTHER; note = 2'-deoxyadenosine-3'-phosphorothioate
  modified_base 8: mod_base = OTHER; note = 2'-deoxyadenosine-3'-phosphorothioate
  modified_base 9: mod_base = OTHER; note = 2'-deoxythymidine-3'-phosphorothioate
  modified_base 10: mod_base = OTHER; note = 2'-deoxyguanosine-3'-phosphorothioate
  modified_base 11: mod_base = OTHER; note = 2'-deoxythymidine-3'-phosphorothioate
  modified_base 12: mod_base = OTHER; note = 2'-deoxyadenosine-3'-phosphorothioate
  modified_base 13: mod_base = OTHER; note = 2'-deoxythymidine-3'-phosphorothioate
  modified_base 14: mod_base = OTHER; note = 2'-deoxyadenosine-3'-phosphorothioate
  modified_base 15: mod_base = OTHER; note = 5'-methyl-deoxycytidine-3'-phosphorothioate
  modified_base 16: mod_base = OTHER; note = 2'-O-methyluridine-3'-phosphorothioate
  modified_base 17: mod_base = OTHER; note = 2'-O-methyluridine-3'-phosphorothioate
  modified_base 18: mod_base = OTHER; note = 2'-O-methylguanosine-3'-phosphorothioate
  modified_base 19: mod_base = OTHER; note = 2'-O-methyluridine-3'-phosphorothioate
  modified_base 20: mod_base = OTHER; note = 2'-O-methyladenosine
  misc_feature 1..5: note = RNA
  misc_feature 16..20: note = RNA
  misc_feature 6..15: note = DNA
gcttccaatgtatacttgta

SEQ ID NO: 434 - DNA, 20 bp, synthetic construct
  source 1..20: mol_type = other DNA
  modified_base 1: mod_base = OTHER; note = 2'-O-methyluridine-3'-phosphorothioate
  modified_base 2: mod_base = OTHER; note = 2'-O-methyluridine-3'-phosphorothioate
  modified_base 3: mod_base = OTHER; note = 2'-O-methylguanosine-3'-phosphorothioate
  modified_base 4: mod_base = OTHER; note = 2'-O-methyladenosine-3'-phosphorothioate
  modified_base 5: mod_base = OTHER; note = 2'-O-methyluridine-3'-phosphorothioate
  modified_base 6: mod_base = OTHER; note = 5'-methyl-deoxycytidine-3'-phosphorothioate
  modified_base 7: mod_base = OTHER; note = 2'-deoxythymidine-3'-phosphorothioate
  modified_base 8: mod_base = OTHER; note = 2'-deoxythymidine-3'-phosphorothioate
  modified_base 9: mod_base = OTHER; note = 2'-deoxythymidine-3'-phosphorothioate
  modified_base 10: mod_base = OTHER; note = 2'-deoxyadenosine-3'-phosphorothioate
  modified_base 11: mod_base = OTHER; note = 2'-deoxythymidine-3'-phosphorothioate
  modified_base 12: mod_base = OTHER; note = 2'-deoxyguanosine-3'-phosphorothioate
  modified_base 13: mod_base = OTHER; note = 5'-methyl-deoxycytidine-3'-phosphorothioate
  modified_base 14: mod_base = OTHER; note = 2'-deoxythymidine-3'-phosphorothioate
  modified_base 15: mod_base = OTHER; note = 2'-deoxythymidine-3'-phosphorothioate
  modified_base 16: mod_base = OTHER; note = 2'-O-methylcytidine-3'-phosphorothioate
  modified_base 17: mod_base = OTHER; note = 2'-O-methylcytidine-3'-phosphorothioate
  modified_base 18: mod_base = OTHER; note = 2'-O-methyladenosine-3'-phosphorothioate
  modified_base 19: mod_base = OTHER; note = 2'-O-methyladenosine-3'-phosphorothioate
  modified_base 20: mod_base = OTHER; note = 2'-O-methyluridine
  misc_feature 1..5: note = RNA
  misc_feature 16..20: note = RNA
  misc_feature 6..15: note = DNA
ttgatctttatgcttccaat

SEQ ID NO: 435 - DNA, 20 bp, synthetic construct
  source 1..20: mol_type = other DNA
  modified_base 1: mod_base = OTHER; note = 2'-O-methyladenosine-3'-phosphorothioate
  modified_base 2: mod_base = OTHER; note = 2'-O-methylcytidine-3'-phosphorothioate
  modified_base 3: mod_base = OTHER; note = 2'-O-methylcytidine-3'-phosphorothioate
  modified_base 4: mod_base = OTHER; note = 2'-O-methyladenosine-3'-phosphorothioate
  modified_base 5: mod_base = OTHER; note = 2'-O-methyladenosine-3'-phosphorothioate
  modified_base 6: mod_base = OTHER; note = 5'-methyl-deoxycytidine-3'-phosphorothioate
  modified_base 7: mod_base = OTHER; note = 2'-deoxyguanosine-3'-phosphorothioate
  modified_base 8: mod_base = OTHER; note = 2'-deoxyguanosine-3'-phosphorothioate
  modified_base 9: mod_base = OTHER; note = 2'-deoxythymidine-3'-phosphorothioate
  modified_base 10: mod_base = OTHER; note = 2'-deoxythymidine-3'-phosphorothioate
  modified_base 11: mod_base = OTHER; note = 2'-deoxythymidine-3'-phosphorothioate
  modified_base 12: mod_base = OTHER; note = 2'-deoxyguanosine-3'-phosphorothioate
  modified_base 13: mod_base = OTHER; note = 2'-deoxyadenosine-3'-phosphorothioate
  modified_base 14: mod_base = OTHER; note = 2'-deoxythymidine-3'-phosphorothioate
  modified_base 15: mod_base = OTHER; note = 5'-methyl-deoxycytidine-3'-phosphorothioate
  modified_base 16: mod_base = OTHER; note = 2'-O-methyluridine-3'-phosphorothioate
  modified_base 17: mod_base = OTHER; note = 2'-O-methyluridine-3'-phosphorothioate
  modified_base 18: mod_base = OTHER; note = 2'-O-methyluridine-3'-phosphorothioate
  modified_base 19: mod_base = OTHER; note = 2'-O-methyladenosine-3'-phosphorothioate
  modified_base 20: mod_base = OTHER; note = 2'-O-methyluridine
  misc_feature 1..5: note = RNA
  misc_feature 16..20: note = RNA
  misc_feature 6..15: note = DNA
accaacggtttgatctttat

SEQ ID NO: 436 - DNA, 20 bp, synthetic construct
  source 1..20: mol_type = other DNA
  modified_base 1: mod_base = OTHER; note = 2'-O-methyladenosine-3'-phosphorothioate
  modified_base 2: mod_base = OTHER; note = 2'-O-methylcytidine-3'-phosphorothioate
  modified_base 3: mod_base = OTHER; note = 2'-O-methyladenosine-3'-phosphorothioate
  modified_base 4: mod_base = OTHER; note = 2'-O-methyluridine-3'-phosphorothioate
  modified_base 5: mod_base = OTHER; note = 2'-O-methylcytidine-3'-phosphorothioate
  modified_base 6: mod_base = OTHER; note = 5'-methyl-deoxycytidine-3'-phosphorothioate
  modified_base 7: mod_base = OTHER; note = 2'-deoxythymidine-3'-phosphorothioate
  modified_base 8: mod_base = OTHER; note = 2'-deoxyadenosine-3'-phosphorothioate
  modified_base 9: mod_base = OTHER; note = 2'-deoxythymidine-3'-phosphorothioate
  modified_base 10: mod_base = OTHER; note = 2'-deoxyguanosine-3'-phosphorothioate
  modified_base 11: mod_base = OTHER; note = 5'-methyl-deoxycytidine-3'-phosphorothioate
  modified_base 12: mod_base = OTHER; note = 2'-deoxyadenosine-3'-phosphorothioate
  modified_base 13: mod_base = OTHER; note = 2'-deoxyadenosine-3'-phosphorothioate
  modified_base 14: mod_base = OTHER; note = 5'-methyl-deoxycytidine-3'-phosphorothioate
  modified_base 15: mod_base = OTHER; note = 5'-methyl-deoxycytidine-3'-phosphorothioate
  modified_base 16: mod_base = OTHER; note = 2'-O-methyladenosine-3'-phosphorothioate
  modified_base 17: mod_base = OTHER; note = 2'-O-methyladenosine-3'-phosphorothioate
  modified_base 18: mod_base = OTHER; note = 2'-O-methylcytidine-3'-phosphorothioate
  modified_base 19: mod_base = OTHER; note = 2'-O-methylguanosine-3'-phosphorothioate
  modified_base 20: mod_base = OTHER; note = 2'-O-methylguanosine
  misc_feature 1..5: note = RNA
  misc_feature 16..20: note = RNA
  misc_feature 6..15: note = DNA
acatcctatgcaaccaacgg

SEQ ID NO: 437 - DNA, 20 bp, synthetic construct
  source 1..20: mol_type = other DNA
  modified_base 1: mod_base = OTHER; note = 2'-O-methyladenosine-3'-phosphorothioate
  modified_base 2: mod_base = OTHER; note = 2'-O-methyladenosine-3'-phosphorothioate
  modified_base 3: mod_base = OTHER; note = 2'-O-methyladenosine-3'-phosphorothioate
  modified_base 4: mod_base = OTHER; note = 2'-O-methyluridine-3'-phosphorothioate
  modified_base 5: mod_base = OTHER; note = 2'-O-methyladenosine-3'-phosphorothioate
  modified_base 6: mod_base = OTHER; note = 2'-deoxyadenosine-3'-phosphorothioate
  modified_base 7: mod_base = OTHER; note = 2'-deoxyadenosine-3'-phosphorothioate
  modified_base 8: mod_base = OTHER; note = 2'-deoxyguanosine-3'-phosphorothioate
  modified_base 9: mod_base = OTHER; note = 2'-deoxyguanosine-3'-phosphorothioate
  modified_base 10: mod_base = OTHER; note = 2'-deoxythymidine-3'-phosphorothioate
  modified_base 11: mod_base = OTHER; note = 2'-deoxyguanosine-3'-phosphorothioate
  modified_base 12: mod_base = OTHER; note = 2'-deoxyadenosine-3'-phosphorothioate
  modified_base 13: mod_base = OTHER; note = 5'-methyl-deoxycytidine-3'-phosphorothioate
  modified_base 14: mod_base = OTHER; note = 2'-deoxyadenosine-3'-phosphorothioate
  modified_base 15: mod_base = OTHER; note = 2'-deoxythymidine-3'-phosphorothioate
  modified_base 16: mod_base = OTHER; note = 2'-O-methylcytidine-3'-phosphorothioate
  modified_base 17: mod_base = OTHER; note = 2'-O-methylcytidine-3'-phosphorothioate
  modified_base 18: mod_base = OTHER; note = 2'-O-methyluridine-3'-phosphorothioate
  modified_base 19: mod_base = OTHER; note = 2'-O-methyladenosine-3'-phosphorothioate
  modified_base 20: mod_base = OTHER; note = 2'-O-methyluridine
  misc_feature 1..5: note = RNA
  misc_feature 16..20: note = RNA
  misc_feature 6..15: note = DNA
aaataaaggtgacatcctat

SEQ ID NO: 438 - DNA, 20 bp, synthetic construct
  source 1..20: mol_type = other DNA
  modified_base 1: mod_base = OTHER; note = 2'-O-methyluridine-3'-phosphorothioate
  modified_base 2: mod_base = OTHER; note = 2'-O-methyladenosine-3'-phosphorothioate
  modified_base 3: mod_base = OTHER; note = 2'-O-methyluridine-3'-phosphorothioate
  modified_base 4: mod_base = OTHER; note = 2'-O-methyluridine-3'-phosphorothioate
  modified_base 5: mod_base = OTHER; note = 2'-O-methyladenosine-3'-phosphorothioate
  modified_base 6: mod_base = OTHER; note = 2'-deoxyadenosine-3'-phosphorothioate
  modified_base 7: mod_base = OTHER; note = 2'-deoxythymidine-3'-phosphorothioate
  modified_base 8: mod_base = OTHER; note = 2'-deoxyguanosine-3'-phosphorothioate
  modified_base 9: mod_base = OTHER; note = 2'-deoxyguanosine-3'-phosphorothioate
  modified_base 10: mod_base = OTHER; note = 2'-deoxyguanosine-3'-phosphorothioate
  modified_base 11: mod_base = OTHER; note = 2'-deoxythymidine-3'-phosphorothioate
  modified_base 12: mod_base = OTHER; note = 2'-deoxythymidine-3'-phosphorothioate
  modified_base 13: mod_base = OTHER; note = 2'-deoxyadenosine-3'-phosphorothioate
  modified_base 14: mod_base = OTHER; note = 2'-deoxyadenosine-3'-phosphorothioate
  modified_base 15: mod_base = OTHER; note = 2'-deoxyadenosine-3'-phosphorothioate
  modified_base 16: mod_base = OTHER; note = 2'-O-methyluridine-3'-phosphorothioate
  modified_base 17: mod_base = OTHER; note = 2'-O-methyladenosine-3'-phosphorothioate
  modified_base 18: mod_base = OTHER; note = 2'-O-methyladenosine-3'-phosphorothioate
  modified_base 19: mod_base = OTHER; note = 2'-O-methyladenosine-3'-phosphorothioate
  modified_base 20: mod_base = OTHER; note = 2'-O-methylguanosine
  misc_feature 1..5: note = RNA
  misc_feature 16..20: note = RNA
  misc_feature 6..15: note = DNA
tattaatgggttaaataaag

SEQ ID NO: 439 - DNA, 20 bp, synthetic construct
  source 1..20: mol_type = other DNA
  modified_base 1: mod_base = OTHER; note = 2'-O-methyluridine-3'-phosphorothioate
  modified_base 2: mod_base = OTHER; note = 2'-O-methylcytidine-3'-phosphorothioate
  modified_base 3: mod_base = OTHER; note = 2'-O-methyladenosine-3'-phosphorothioate
  modified_base 4: mod_base = OTHER; note = 2'-O-methyladenosine-3'-phosphorothioate
  modified_base 5: mod_base = OTHER; note = 2'-O-methylcytidine-3'-phosphorothioate
  modified_base 6: mod_base = OTHER; note = 5'-methyl-deoxycytidine-3'-phosphorothioate
  modified_base 7: mod_base = OTHER; note = 2'-deoxyadenosine-3'-phosphorothioate
  modified_base 8: mod_base = OTHER; note = 2'-deoxyguanosine-3'-phosphorothioate
  modified_base 9: mod_base = OTHER; note = 2'-deoxyadenosine-3'-phosphorothioate
  modified_base 10: mod_base = OTHER; note = 2'-deoxyguanosine-3'-phosphorothioate
  modified_base 11: mod_base = OTHER; note = 2'-deoxythymidine-3'-phosphorothioate
  modified_base 12: mod_base = OTHER; note = 2'-deoxyadenosine-3'-phosphorothioate
  modified_base 13: mod_base = OTHER; note = 2'-deoxythymidine-3'-phosphorothioate
  modified_base 14: mod_base = OTHER; note = 2'-deoxythymidine-3'-phosphorothioate
  modified_base 15: mod_base = OTHER; note = 2'-deoxyadenosine-3'-phosphorothioate
  modified_base 16: mod_base = OTHER; note = 2'-O-methyladenosine-3'-phosphorothioate
  modified_base 17: mod_base = OTHER; note = 2'-O-methyluridine-3'-phosphorothioate
  modified_base 18: mod_base = OTHER; note = 2'-O-methylguanosine-3'-phosphorothioate
  modified_base 19: mod_base = OTHER; note = 2'-O-methylguanosine-3'-phosphorothioate
  modified_base 20: mod_base = OTHER; note = 2'-O-methylguanosine
  misc_feature 1..5: note = RNA
  misc_feature 16..20: note = RNA
  misc_feature 6..15: note = DNA
tcaaccagagtattaatggg

SEQ ID NO: 440 - DNA, 20 bp, synthetic construct
  source 1..20: mol_type = other DNA
  modified_base 1: mod_base = OTHER; note = 2'-O-methyladenosine-3'-phosphorothioate
  modified_base 2: mod_base = OTHER; note = 2'-O-methyladenosine-3'-phosphorothioate
  modified_base 3: mod_base = OTHER; note = 2'-O-methyluridine-3'-phosphorothioate
  modified_base 4: mod_base = OTHER; note = 2'-O-methyladenosine-3'-phosphorothioate
  modified_base 5: mod_base = OTHER; note = 2'-O-methyladenosine-3'-phosphorothioate
  modified_base 6: mod_base = OTHER; note = 2'-deoxyguanosine-3'-phosphorothioate
  modified_base 7: mod_base = OTHER; note = 2'-deoxyadenosine-3'-phosphorothioate
  modified_base 8: mod_base = OTHER; note = 2'-deoxythymidine-3'-phosphorothioate
  modified_base 9: mod_base = OTHER; note = 2'-deoxythymidine-3'-phosphorothioate
  modified_base 10: mod_base = OTHER; note = 2'-deoxyadenosine-3'-phosphorothioate
  modified_base 11: mod_base = OTHER; note = 2'-deoxyguanosine-3'-phosphorothioate
  modified_base 12: mod_base = OTHER; note = 2'-deoxyguanosine-3'-phosphorothioate
  modified_base 13: mod_base = OTHER; note = 2'-deoxythymidine-3'-phosphorothioate
  modified_base 14: mod_base = OTHER; note = 5'-methyl-deoxycytidine-3'-phosphorothioate
  modified_base 15: mod_base = OTHER; note = 2'-deoxyadenosine-3'-phosphorothioate
  modified_base 16: mod_base = OTHER; note = 2'-O-methyladenosine-3'-phosphorothioate
  modified_base 17: mod_base = OTHER; note = 2'-O-methylcytidine-3'-phosphorothioate
  modified_base 18: mod_base = OTHER; note = 2'-O-methylcytidine-3'-phosphorothioate
  modified_base 19: mod_base = OTHER; note = 2'-O-methyladenosine-3'-phosphorothioate
  modified_base 20: mod_base = OTHER; note = 2'-O-methylguanosine
  misc_feature 1..5: note = RNA
  misc_feature 16..20: note = RNA
  misc_feature 6..15: note = DNA
aataagattaggtcaaccag

SEQ ID NO: 441 - DNA, 20 bp, synthetic construct
  source 1..20: mol_type = other DNA
  modified_base 1: mod_base = OTHER; note = 2'-O-methyladenosine-3'-phosphorothioate
  modified_base 2: mod_base = OTHER; note = 2'-O-methylguanosine-3'-phosphorothioate
  modified_base 3: mod_base = OTHER; note = 2'-O-methylguanosine-3'-phosphorothioate
  modified_base 4: mod_base = OTHER; note = 2'-O-methyluridine-3'-phosphorothioate
  modified_base 5: mod_base = OTHER; note = 2'-O-methylcytidine-3'-phosphorothioate
  modified_base 6: mod_base = OTHER; note = 2'-deoxythymidine-3'-phosphorothioate
  modified_base 7: mod_base = OTHER; note = 2'-deoxyguanosine-3'-phosphorothioate
  modified_base 8: mod_base = OTHER; note = 2'-deoxyadenosine-3'-phosphorothioate
  modified_base 9: mod_base = OTHER; note = 2'-deoxyguanosine-3'-phosphorothioate
  modified_base 10: mod_base = OTHER; note = 2'-deoxyadenosine-3'-phosphorothioate
  modified_base 11: mod_base = OTHER; note = 2'-deoxyadenosine-3'-phosphorothioate
  modified_base 12: mod_base = OTHER; note = 2'-deoxythymidine-3'-phosphorothioate
  modified_base 13: mod_base = OTHER; note = 2'-deoxyadenosine-3'-phosphorothioate
  modified_base 14: mod_base = OTHER; note = 2'-deoxyadenosine-3'-phosphorothioate
  modified_base 15: mod_base = OTHER; note = 2'-deoxyguanosine-3'-phosphorothioate
  modified_base 16: mod_base = OTHER; note = 2'-O-methyladenosine-3'-phosphorothioate
  modified_base 17: mod_base = OTHER; note = 2'-O-methyluridine-3'-phosphorothioate
  modified_base 18: mod_base = OTHER; note = 2'-O-methyluridine-3'-phosphorothioate
  modified_base 19: mod_base = OTHER; note = 2'-O-methyladenosine-3'-phosphorothioate
  modified_base 20: mod_base = OTHER; note = 2'-O-methylguanosine
  misc_feature 1..5: note = RNA
  misc_feature 16..20: note = RNA
  misc_feature 6..15: note = DNA
aggtctgagaataagattag

SEQ ID NO: 442 - DNA, 20 bp, synthetic construct
  source 1..20: mol_type = other DNA
  modified_base 1: mod_base = OTHER; note = 2'-O-methyladenosine-3'-phosphorothioate
  modified_base 2: mod_base = OTHER; note = 2'-O-methylcytidine-3'-phosphorothioate
  modified_base 3: mod_base = OTHER; note = 2'-O-methyladenosine-3'-phosphorothioate
  modified_base 4: mod_base = OTHER; note = 2'-O-methylguanosine-3'-phosphorothioate
  modified_base 5: mod_base = OTHER; note = 2'-O-methyladenosine-3'-phosphorothioate
  modified_base 6: mod_base = OTHER; note = 5'-methyl-deoxycytidine-3'-phosphorothioate
  modified_base 7: mod_base = OTHER; note = 2'-deoxyadenosine-3'-phosphorothioate
  modified_base 8: mod_base = OTHER; note = 5'-methyl-deoxycytidine-3'-phosphorothioate
  modified_base 9: mod_base = OTHER; note = 2'-deoxythymidine-3'-phosphorothioate
  modified_base 10: mod_base = OTHER; note = 2'-deoxythymidine-3'-phosphorothioate
  modified_base 11: mod_base = OTHER; note = 2'-deoxyguanosine-3'-phosphorothioate
  modified_base 12: mod_base = OTHER; note = 2'-deoxyadenosine-3'-phosphorothioate
  modified_base 13: mod_base = OTHER; note = 2'-deoxyguanosine-3'-phosphorothioate
  modified_base 14: mod_base = OTHER; note = 2'-deoxyguanosine-3'-phosphorothioate
  modified_base 15: mod_base = OTHER; note = 2'-deoxythymidine-3'-phosphorothioate
  modified_base 16: mod_base = OTHER; note = 2'-O-methylcytidine-3'-phosphorothioate
  modified_base 17: mod_base = OTHER; note = 2'-O-methyluridine-3'-phosphorothioate
  modified_base 18: mod_base = OTHER; note = 2'-O-methylguanosine-3'-phosphorothioate
  modified_base 19: mod_base = OTHER; note = 2'-O-methyladenosine-3'-phosphorothioate
  modified_base 20: mod_base = OTHER; note = 2'-O-methylguanosine
  misc_feature 1..5: note = RNA
  misc_feature 16..20: note = RNA
  misc_feature 6..15: note = DNA
acagacacttgaggtctgag

SEQ ID NO: 443 - DNA, 20 bp, synthetic construct
  source 1..20: mol_type = other DNA
  modified_base 1: mod_base = OTHER; note = 2'-O-methyladenosine-3'-phosphorothioate
  modified_base 2: mod_base = OTHER; note = 2'-O-methyladenosine-3'-phosphorothioate
  modified_base 3: mod_base = OTHER; note = 2'-O-methylcytidine-3'-phosphorothioate
  modified_base 4: mod_base = OTHER; note = 2'-O-methyladenosine-3'-phosphorothioate
  modified_base 5: mod_base = OTHER; note = 2'-O-methylguanosine-3'-phosphorothioate
  modified_base 6: mod_base = OTHER; note = 2'-deoxyadenosine-3'-phosphorothioate
  modified_base 7: mod_base = OTHER; note = 2'-deoxythymidine-3'-phosphorothioate
  modified_base 8: mod_base = OTHER; note = 2'-deoxyadenosine-3'-phosphorothioate
  modified_base 9: mod_base = OTHER; note = 5'-methyl-deoxycytidine-3'-phosphorothioate
  modified_base 10: mod_base = OTHER; note = 2'-deoxythymidine-3'-phosphorothioate
  modified_base 11: mod_base = OTHER; note = 2'-deoxyguanosine-3'-phosphorothioate
  modified_base 12: mod_base = OTHER; note = 5'-methyl-deoxycytidine-3'-phosphorothioate
  modified_base 13: mod_base = OTHER; note = 2'-deoxyadenosine-3'-phosphorothioate
  modified_base 14: mod_base = OTHER; note = 5'-methyl-deoxycytidine-3'-phosphorothioate
  modified_base 15: mod_base = OTHER; note = 2'-deoxyadenosine-3'-phosphorothioate
  modified_base 16: mod_base = OTHER; note = 2'-O-methylguanosine-3'-phosphorothioate
  modified_base 17: mod_base = OTHER; note = 2'-O-methyladenosine-3'-phosphorothioate
  modified_base 18: mod_base = OTHER; note = 2'-O-methylcytidine-3'-phosphorothioate
  modified_base 19: mod_base = OTHER; note = 2'-O-methyladenosine-3'-phosphorothioate
  modified_base 20: mod_base = OTHER; note = 2'-O-methylcytidine
  misc_feature 1..5: note = RNA
  misc_feature 16..20: note = RNA
  misc_feature 6..15: note = DNA
aacagatactgcacagacac

SEQ ID NO: 444 - DNA, 20 bp, synthetic construct
  source 1..20: mol_type = other DNA
  modified_base 1: mod_base = OTHER; note = 2'-O-methyladenosine-3'-phosphorothioate
  modified_base 2: mod_base = OTHER; note = 2'-O-methyluridine-3'-phosphorothioate
  modified_base 3: mod_base = OTHER; note = 2'-O-methyladenosine-3'-phosphorothioate
  modified_base 4: mod_base = OTHER; note = 2'-O-methyluridine-3'-phosphorothioate
  modified_base 5: mod_base = OTHER; note = 2'-O-methyluridine-3'-phosphorothioate
  modified_base 6: mod_base = OTHER; note = 2'-deoxythymidine-3'-phosphorothioate
  modified_base 7: mod_base = OTHER; note = 2'-deoxyadenosine-3'-phosphorothioate
  modified_base 8: mod_base = OTHER; note = 2'-deoxyadenosine-3'-phosphorothioate
  modified_base 9: mod_base = OTHER; note = 2'-deoxyadenosine-3'-phosphorothioate
  modified_base 10: mod_base = OTHER; note = 2'-deoxythymidine-3'-phosphorothioate
  modified_base 11: mod_base = OTHER; note = 2'-deoxyguanosine-3'-phosphorothioate
  modified_base 12: mod_base = OTHER; note = 2'-deoxyguanosine-3'-phosphorothioate
  modified_base 13: mod_base = OTHER; note = 2'-deoxyadenosine-3'-phosphorothioate
  modified_base 14: mod_base = OTHER; note = 2'-deoxyadenosine-3'-phosphorothioate
  modified_base 15: mod_base = OTHER; note = 5'-methyl-deoxycytidine-3'-phosphorothioate
  modified_base 16: mod_base = OTHER; note = 2'-O-methyladenosine-3'-phosphorothioate
  modified_base 17: mod_base = OTHER; note = 2'-O-methylguanosine-3'-phosphorothioate
  modified_base 18: mod_base = OTHER; note = 2'-O-methyladenosine-3'-phosphorothioate
  modified_base 19: mod_base = OTHER; note = 2'-O-methyluridine-3'-phosphorothioate
  modified_base 20: mod_base = OTHER; note = 2'-O-methyladenosine
  misc_feature 1..5: note = RNA
  misc_feature 16..20: note = RNA
  misc_feature 6..15: note = DNA
atatttaaatggaacagata

SEQ ID NO: 445 - DNA, 20 bp, synthetic construct
  source 1..20: mol_type = other DNA
  modified_base 1: mod_base = OTHER; note = 2'-O-methyluridine-3'-phosphorothioate
  modified_base 2: mod_base = OTHER; note = 2'-O-methyluridine-3'-phosphorothioate
  modified_base 3: mod_base = OTHER; note = 2'-O-methylguanosine-3'-phosphorothioate
  modified_base 4: mod_base = OTHER; note = 2'-O-methyluridine-3'-phosphorothioate
  modified_base 5: mod_base = OTHER; note = 2'-O-methyladenosine-3'-phosphorothioate
  modified_base 6: mod_base = OTHER; note = 2'-deoxyadenosine-3'-phosphorothioate
  modified_base 7: mod_base = OTHER; note = 2'-deoxyadenosine-3'-phosphorothioate
  modified_base 8: mod_base = OTHER; note = 2'-deoxyguanosine-3'-phosphorothioate
  modified_base 9: mod_base = OTHER; note = 5'-methyl-deoxycytidine-3'-phosphorothioate
  modified_base 10: mod_base = OTHER; note = 2'-deoxythymidine-3'-phosphorothioate
  modified_base 11: mod_base = OTHER; note = 2'-deoxyguanosine-3'-phosphorothioate
  modified_base 12: mod_base = OTHER; note = 2'-deoxyadenosine-3'-phosphorothioate
  modified_base 13: mod_base = OTHER; note = 2'-deoxythymidine-3'-phosphorothioate
  modified_base 14: mod_base = OTHER; note = 2'-deoxyadenosine-3'-phosphorothioate
  modified_base 15: mod_base = OTHER; note = 2'-deoxythymidine-3'-phosphorothioate
  modified_base 16: mod_base = OTHER; note = 2'-O-methyluridine-3'-phosphorothioate
  modified_base 17: mod_base = OTHER; note = 2'-O-methyluridine-3'-phosphorothioate
  modified_base 18: mod_base = OTHER; note = 2'-O-methyladenosine-3'-phosphorothioate
  modified_base 19: mod_base = OTHER; note = 2'-O-methyladenosine-3'-phosphorothioate
  modified_base 20: mod_base = OTHER; note = 2'-O-methyladenosine
  misc_feature 1..5: note = RNA
  misc_feature 16..20: note = RNA
  misc_feature 6..15: note = DNA
ttgtaaagctgatatttaaa

SEQ ID NO: 446 - DNA, 20 bp, synthetic construct
  source 1..20: mol_type = other DNA
  modified_base 1: mod_base = OTHER; note = 2'-O-methyladenosine-3'-phosphorothioate
  modified_base 2: mod_base = OTHER; note = 2'-O-methylcytidine-3'-phosphorothioate
  modified_base 3: mod_base = OTHER; note = 2'-O-methylcytidine-3'-phosphorothioate
  modified_base 4: mod_base = OTHER; note = 2'-O-methyladenosine-3'-phosphorothioate
  modified_base 5: mod_base = OTHER; note = 2'-O-methylcytidine-3'-phosphorothioate
  modified_base 6: mod_base = OTHER; note = 2'-deoxyadenosine-3'-phosphorothioate
  modified_base 7: mod_base = OTHER; note = 2'-deoxythymidine-3'-phosphorothioate
  modified_base 8: mod_base = OTHER; note = 2'-deoxyadenosine-3'-phosphorothioate
  modified_base 9: mod_base = OTHER; note = 2'-deoxyadenosine-3'-phosphorothioate
  modified_base 10: mod_base = OTHER; note = 2'-deoxythymidine-3'-phosphorothioate
  modified_base 11: mod_base = OTHER; note = 2'-deoxythymidine-3'-phosphorothioate
  modified_base 12: mod_base = OTHER; note = 2'-deoxyguanosine-3'-phosphorothioate
  modified_base 13: mod_base = OTHER; note = 2'-deoxythymidine-3'-phosphorothioate
  modified_base 14: mod_base = OTHER; note = 2'-deoxyadenosine-3'-phosphorothioate
  modified_base 15: mod_base = OTHER; note = 2'-deoxyadenosine-3'-phosphorothioate
  modified_base 16: mod_base = OTHER; note = 2'-O-methyladenosine-3'-phosphorothioate
  modified_base 17: mod_base = OTHER; note = 2'-O-methylguanosine-3'-phosphorothioate
  modified_base 18: mod_base = OTHER; note = 2'-O-methylcytidine-3'-phosphorothioate
  modified_base 19: mod_base = OTHER; note = 2'-O-methyluridine-3'-phosphorothioate
  modified_base 20: mod_base = OTHER; note = 2'-O-methylguanosine
  misc_feature 1..5: note = RNA
  misc_feature 16..20: note = RNA
  misc_feature 6..15: note = DNA
accacataattgtaaagctg

SEQ ID NO: 447 - DNA, 20 bp, synthetic construct
  source 1..20: mol_type = other DNA
  modified_base 1: mod_base = OTHER; note = 2'-O-methyladenosine-3'-phosphorothioate
  modified_base 2: mod_base = OTHER; note = 2'-O-methyluridine-3'-phosphorothioate
  modified_base 3: mod_base = OTHER; note = 2'-O-methylguanosine-3'-phosphorothioate
  modified_base 4: mod_base = OTHER; note = 2'-O-methyluridine-3'-phosphorothioate
  modified_base 5: mod_base = OTHER; note = 2'-O-methylguanosine-3'-phosphorothioate
  modified_base 6: mod_base = OTHER; note = 2'-deoxythymidine-3'-phosphorothioate
  modified_base 7: mod_base = OTHER; note = 2'-deoxyguanosine-3'-phosphorothioate
  modified_base 8: mod_base = OTHER; note = 2'-deoxythymidine-3'-phosphorothioate
  modified_base 9: mod_base = OTHER; note = 2'-deoxyadenosine-3'-phosphorothioate
  modified_base 10: mod_base = OTHER; note = 2'-deoxyguanosine-3'-phosphorothioate
  modified_base 11: mod_base = OTHER; note = 2'-deoxyguanosine-3'-phosphorothioate
  modified_base 12: mod_base = OTHER; note = 5'-methyl-deoxycytidine-3'-phosphorothioate
  modified_base 13: mod_base = OTHER; note = 2'-deoxythymidine-3'-phosphorothioate
  modified_base 14: mod_base = OTHER; note = 2'-deoxyadenosine-3'-phosphorothioate
  modified_base 15: mod_base = OTHER; note = 5'-methyl-deoxycytidine-3'-phosphorothioate
  modified_base 16: mod_base = OTHER; note = 2'-O-methylcytidine-3'-phosphorothioate
  modified_base 17: mod_base = OTHER; note = 2'-O-methyladenosine-3'-phosphorothioate
  modified_base 18: mod_base = OTHER; note = 2'-O-methylcytidine-3'-phosphorothioate
  modified_base 19: mod_base = OTHER; note = 2'-O-methyladenosine-3'-phosphorothioate
  modified_base 20: mod_base = OTHER; note = 2'-O-methyluridine
  misc_feature 1..5: note = RNA
  misc_feature 16..20: note = RNA
  misc_feature 6..15: note = DNA
atgtgtgtaggctaccacat

SEQ ID NO: 448 - DNA, 20 bp, synthetic construct
  source 1..20: mol_type = other DNA
  modified_base 1: mod_base = OTHER; note = 2'-O-methyladenosine-3'-phosphorothioate
  modified_base 2: mod_base = OTHER; note = 2'-O-methyladenosine-3'-phosphorothioate
  modified_base 3: mod_base = OTHER; note = 2'-O-methyladenosine-3'-phosphorothioate
  modified_base 4: mod_base = OTHER; note = 2'-O-methyluridine-3'-phosphorothioate
  modified_base 5: mod_base = OTHER; note = 2'-O-methylguanosine-3'-phosphorothioate
  modified_base 6: mod_base = OTHER; note = 2'-deoxyadenosine-3'-phosphorothioate
  modified_base 7: mod_base = OTHER; note = 2'-deoxyguanosine-3'-phosphorothioate
  modified_base 8: mod_base = OTHER; note = 2'-deoxyadenosine-3'-phosphorothioate
  modified_base 9: mod_base = OTHER; note = 2'-deoxythymidine-3'-phosphorothioate
  modified_base 10: mod_base = OTHER; note = 2'-deoxythymidine-3'-phosphorothioate
  modified_base 11: mod_base = OTHER; note = 2'-deoxyadenosine-3'-phosphorothioate
  modified_base 12: mod_base = OTHER; note = 2'-deoxythymidine-3'-phosphorothioate
  modified_base 13: mod_base = OTHER; note = 2'-deoxyguanosine-3'-phosphorothioate
  modified_base 14: mod_base = OTHER; note = 2'-deoxythymidine-3'-phosphorothioate
  modified_base 15: mod_base = OTHER; note = 2'-deoxyguanosine-3'-phosphorothioate
  modified_base 16: mod_base = OTHER; note = 2'-O-methyluridine-3'-phosphorothioate
  modified_base 17: mod_base = OTHER; note = 2'-O-methylguanosine-3'-phosphorothioate
  modified_base 18: mod_base = OTHER; note = 2'-O-methyluridine-3'-phosphorothioate
  modified_base 19: mod_base = OTHER; note = 2'-O-methyladenosine-3'-phosphorothioate
  modified_base 20: mod_base = OTHER; note = 2'-O-methylguanosine
  misc_feature 1..5: note = RNA
  misc_feature 16..20: note = RNA
  misc_feature 6..15: note = DNA
aaatgagattatgtgtgtag

SEQ ID NO: 449 - DNA, 20 bp, synthetic construct
  source 1..20: mol_type = other DNA
  modified_base 1: mod_base = OTHER; note = 2'-O-methyluridine-3'-phosphorothioate
  modified_base 2: mod_base = OTHER; note = 2'-O-methyluridine-3'-phosphorothioate
  modified_base 3: mod_base = OTHER; note = 2'-O-methyladenosine-3'-phosphorothioate
  modified_base 4: mod_base = OTHER; note = 2'-O-methylcytidine-3'-phosphorothioate
  modified_base 5: mod_base = OTHER; note = 2'-O-methyladenosine-3'-phosphorothioate
  modified_base 6: mod_base = OTHER; note = 2'-deoxyguanosine-3'-phosphorothioate
  modified_base 7: mod_base = OTHER; note = 5'-methyl-deoxycytidine-3'-phosphorothioate
  modified_base 8: mod_base = OTHER; note = 2'-deoxyguanosine-3'-phosphorothioate
  modified_base 9: mod_base = OTHER; note = 2'-deoxyadenosine-3'-phosphorothioate
  modified_base 10: mod_base = OTHER; note = 2'-deoxythymidine-3'-phosphorothioate
  modified_base 11: mod_base = OTHER; note = 2'-deoxyguanosine-3'-phosphorothioate
  modified_base 12: mod_base = OTHER; note = 2'-deoxyadenosine-3'-phosphorothioate
  modified_base 13: mod_base = OTHER; note = 2'-deoxyadenosine-3'-phosphorothioate
  modified_base 14: mod_base = OTHER; note = 2'-deoxyadenosine-3'-phosphorothioate
  modified_base 15: mod_base = OTHER; note = 2'-deoxythymidine-3'-phosphorothioate
  modified_base 16: mod_base = OTHER; note = 2'-O-methylguanosine-3'-phosphorothioate
  modified_base 17: mod_base = OTHER; note = 2'-O-methyladenosine-3'-phosphorothioate
  modified_base 18: mod_base = OTHER; note = 2'-O-methylguanosine-3'-phosphorothioate
  modified_base 19: mod_base = OTHER; note = 2'-O-methyladenosine-3'-phosphorothioate
  modified_base 20: mod_base = OTHER; note = 2'-O-methyluridine
  misc_feature 1..5: note = RNA
  misc_feature 16..20: note = RNA
  misc_feature 6..15: note = DNA
ttacagcgatgaaatgagat

SEQ ID NO: 450 - DNA, 20 bp, synthetic construct
  source 1..20: mol_type = other DNA
  modified_base 1: mod_base = OTHER; note = 2'-O-methyladenosine-3'-phosphorothioate
  modified_base 2: mod_base = OTHER; note = 2'-O-methyladenosine-3'-phosphorothioate
  modified_base 3: mod_base = OTHER; note = 2'-O-methylcytidine-3'-phosphorothioate
  modified_base 4: mod_base = OTHER; note = 2'-O-methyladenosine-3'-phosphorothioate
  modified_base 5: mod_base = OTHER; note = 2'-O-methylguanosine-3'-phosphorothioate
  modified_base 6: mod_base = OTHER; note = 2'-deoxyguanosine-3'-phosphorothioate
  modified_base 7: mod_base = OTHER; note = 2'-deoxyguanosine-3'-phosphorothioate
  modified_base 8: mod_base = OTHER; note = 2'-deoxythymidine-3'-phosphorothioate
  modified_base 9: mod_base = OTHER; note = 2'-deoxyguanosine-3'-phosphorothioate
  modified_base 10: mod_base = OTHER; note = 2'-deoxyguanosine-3'-phosphorothioate
  modified_base 11: mod_base = OTHER; note = 2'-deoxythymidine-3'-phosphorothioate
  modified_base 12: mod_base = OTHER; note = 2'-deoxythymidine-3'-phosphorothioate
  modified_base 13: mod_base = OTHER; note = 2'-deoxyadenosine-3'-phosphorothioate
  modified_base 14: mod_base = OTHER; note = 5'-methyl-deoxycytidine-3'-phosphorothioate
  modified_base 15: mod_base = OTHER; note = 2'-deoxyadenosine-3'-phosphorothioate
  modified_base 16: mod_base = OTHER; note = 2'-O-methylguanosine-3'-phosphorothioate
  modified_base 17: mod_base = OTHER; note = 2'-O-methylcytidine-3'-phosphorothioate
  modified_base 18: mod_base = OTHER; note = 2'-O-methylguanosine-3'-phosphorothioate
  modified_base 19: mod_base = OTHER; note = 2'-O-methyladenosine-3'-phosphorothioate
  modified_base 20: mod_base = OTHER; note = 2'-O-methyluridine
  misc_feature 1..5: note = RNA
  misc_feature 16..20: note = RNA
  misc_feature 6..15: note = DNA
aacagggtggttacagcgat

SEQ ID NO: 451 - DNA, 20 bp, synthetic construct
  source 1..20: mol_type = other DNA
  modified_base 1: mod_base = OTHER; note = 2'-O-methyladenosine-3'-phosphorothioate
  modified_base 2: mod_base = OTHER; note = 2'-O-methylguanosine-3'-phosphorothioate
  modified_base 3: mod_base = OTHER; note = 2'-O-methyluridine-3'-phosphorothioate
  modified_base 4: mod_base = OTHER; note = 2'-O-methylguanosine-3'-phosphorothioate
  modified_base 5: mod_base = OTHER; note = 2'-O-methylguanosine-3'-phosphorothioate
  modified_base 6: mod_base = OTHER; note = 2'-deoxythymidine-3'-phosphorothioate
  modified_base 7: mod_base = OTHER; note = 2'-deoxythymidine-3'-phosphorothioate
  modified_base 8: mod_base = OTHER; note = 2'-deoxyadenosine-3'-phosphorothioate
  modified_base 9: mod_base = OTHER; note = 2'-deoxythymidine-3'-phosphorothioate
  modified_base 10: mod_base = OTHER; note = 5'-methyl-deoxycytidine-3'-phosphorothioate
  modified_base 11: mod_base = OTHER; note = 2'-deoxyadenosine-3'-phosphorothioate
  modified_base 12: mod_base = OTHER; note = 5'-methyl-deoxycytidine-3'-phosphorothioate
  modified_base 13: mod_base = OTHER; note = 2'-deoxyadenosine-3'-phosphorothioate
  modified_base 14: mod_base = OTHER; note = 2'-deoxyadenosine-3'-phosphorothioate
  modified_base 15: mod_base = OTHER; note = 5'-methyl-deoxycytidine-3'-phosphorothioate
  modified_base 16: mod_base = OTHER; note = 2'-O-methyladenosine-3'-phosphorothioate
  modified_base 17: mod_base = OTHER; note = 2'-O-methylguanosine-3'-phosphorothioate
  modified_base 18: mod_base = OTHER; note = 2'-O-methylguanosine-3'-phosphorothioate
  modified_base 19: mod_base = OTHER; note = 2'-O-methylguanosine-3'-phosphorothioate
  modified_base 20: mod_base = OTHER; note = 2'-O-methyluridine
  misc_feature 1..5: note = RNA
  misc_feature 16..20: note = RNA
  misc_feature 6..15: note = DNA
agtggttatcacaacagggt

SEQ ID NO: 452 - DNA, 20 bp, synthetic construct
  source 1..20: mol_type = other DNA
  modified_base 1: mod_base = OTHER; note = 2'-O-methylguanosine-3'-phosphorothioate
  modified_base 2: mod_base = OTHER; note = 2'-O-methylguanosine-3'-phosphorothioate
  modified_base 3: mod_base = OTHER; note = 2'-O-methyluridine-3'-phosphorothioate
  modified_base 4: mod_base = OTHER; note = 2'-O-methyladenosine-3'-phosphorothioate
  modified_base 5: mod_base = OTHER; note = 2'-O-methyladenosine-3'-phosphorothioate
  modified_base 6: mod_base = OTHER; note = 2'-deoxyadenosine-3'-phosphorothioate
  modified_base 7: mod_base = OTHER; note = 2'-deoxyadenosine-3'-phosphorothioate
  modified_base 8: mod_base = OTHER; note = 2'-deoxythymidine-3'-phosphorothioate
  modified_base 9: mod_base = OTHER; note = 2'-deoxyadenosine-3'-phosphorothioate
  modified_base 10: mod_base = OTHER; note = 2'-deoxyadenosine-3'-phosphorothioate
  modified_base 11: mod_base = OTHER; note = 2'-deoxythymidine-3'-phosphorothioate
  modified_base 12: mod_base = OTHER; note = 2'-deoxyadenosine-3'-phosphorothioate
  modified_base 13: mod_base = OTHER; note = 2'-deoxyguanosine-3'-phosphorothioate
  modified_base 14: mod_base = OTHER; note = 2'-deoxythymidine-3'-phosphorothioate
  modified_base 15: mod_base = OTHER; note = 2'-deoxyguanosine-3'-phosphorothioate
  modified_base 16: mod_base = OTHER; note = 2'-O-methylguanosine-3'-phosphorothioate
  modified_base 17: mod_base = OTHER; note = 2'-O-methyluridine-3'-phosphorothioate
  modified_base 18: mod_base = OTHER; note = 2'-O-methyluridine-3'-phosphorothioate
  modified_base 19: mod_base = OTHER; note = 2'-O-methyladenosine-3'-phosphorothioate
  modified_base 20: mod_base = OTHER; note = 2'-O-methyluridine
  misc_feature 1..5: note = RNA
  misc_feature 16..20: note = RNA
  misc_feature 6..15: note = DNA
ggtaaaataatagtggttat

SEQ ID NO: 453 - DNA, 20 bp, synthetic construct
  source 1..20: mol_type = other DNA
  modified_base 1: mod_base = OTHER; note = 2'-O-methyladenosine-3'-phosphorothioate
  modified_base 2: mod_base = OTHER; note = 2'-O-methylguanosine-3'-phosphorothioate
  modified_base 3: mod_base = OTHER; note = 2'-O-methylcytidine-3'-phosphorothioate
  modified_base 4: mod_base = OTHER; note = 2'-O-methyluridine-3'-phosphorothioate
  modified_base 5: mod_base = OTHER; note = 2'-O-methylguanosine-3'-phosphorothioate
  modified_base 6: mod_base = OTHER; note = 2'-deoxythymidine-3'-phosphorothioate
  modified_base 7: mod_base = OTHER; note = 2'-deoxyadenosine-3'-phosphorothioate
  modified_base 8: mod_base = OTHER; note = 5'-methyl-deoxycytidine-3'-phosphorothioate
  modified_base 9: mod_base = OTHER; note = 2'-deoxyguanosine-3'-phosphorothioate
  modified_base 10: mod_base = OTHER; note = 2'-deoxyadenosine-3'-phosphorothioate
  modified_base 11: mod_base = OTHER; note = 2'-deoxythymidine-3'-phosphorothioate
  modified_base 12: mod_base = OTHER; note = 2'-deoxyguanosine-3'-phosphorothioate
  modified_base 13: mod_base = OTHER; note = 2'-deoxyguanosine-3'-phosphorothioate
  modified_base 14: mod_base = OTHER; note = 2'-deoxyguanosine-3'-phosphorothioate
  modified_base 15: mod_base = OTHER; note = 2'-deoxythymidine-3'-phosphorothioate
  modified_base 16: mod_base = OTHER; note = 2'-O-methyladenosine-3'-phosphorothioate
  modified_base 17: mod_base = OTHER; note = 2'-O-methyladenosine-3'-phosphorothioate
  modified_base 18: mod_base = OTHER; note = 2'-O-methyladenosine-3'-phosphorothioate
  modified_base 19: mod_base = OTHER; note = 2'-O-methyladenosine-3'-phosphorothioate
  modified_base 20: mod_base = OTHER; note = 2'-O-methyluridine
  misc_feature 1..5: note = RNA
  misc_feature 16..20: note = RNA
  misc_feature 6..15: note = DNA
agctgtacgatgggtaaaat

SEQ ID NO: 454 - DNA, 20 bp, synthetic construct
  source 1..20: mol_type = other DNA
  modified_base 1: mod_base = OTHER; note = 2'-O-methyluridine-3'-phosphorothioate
  modified_base 2: mod_base = OTHER; note = 2'-O-methyluridine-3'-phosphorothioate
  modified_base 3: mod_base = OTHER; note = 2'-O-methylguanosine-3'-phosphorothioate
  modified_base 4: mod_base = OTHER; note = 2'-O-methylcytidine-3'-phosphorothioate
  modified_base 5: mod_base = OTHER; note = 2'-O-methyluridine-3'-phosphorothioate
  modified_base 6: mod_base = OTHER; note = 2'-deoxythymidine-3'-phosphorothioate
  modified_base 7: mod_base = OTHER; note = 5'-methyl-deoxycytidine-3'-phosphorothioate
  modified_base 8: mod_base = OTHER; note = 5'-methyl-deoxycytidine-3'-phosphorothioate
  modified_base 9: mod_base = OTHER; note = 2'-deoxythymidine-3'-phosphorothioate
  modified_base 10: mod_base = OTHER; note = 5'-methyl-deoxycytidine-3'-phosphorothioate
  modified_base 11: mod_base = OTHER; note = 2'-deoxyadenosine-3'-phosphorothioate
  modified_base 12: mod_base = OTHER; note = 2'-deoxyguanosine-3'-phosphorothioate
  modified_base 13: mod_base = OTHER; note = 5'-methyl-deoxycytidine-3'-phosphorothioate
  modified_base 14: mod_base = OTHER; note = 2'-deoxythymidine-3'-phosphorothioate
  modified_base 15: mod_base = OTHER; note = 2'-deoxyguanosine-3'-phosphorothioate
  modified_base 16: mod_base = OTHER; note = 2'-O-methyluridine-3'-phosphorothioate
  modified_base 17: mod_base = OTHER; note = 2'-O-methyladenosine-3'-phosphorothioate
  modified_base 18: mod_base = OTHER; note = 2'-O-methylcytidine-3'-phosphorothioate
  modified_base 19: mod_base = OTHER; note = 2'-O-methylguanosine-3'-phosphorothioate
  modified_base 20: mod_base = OTHER; note = 2'-O-methyladenosine
  misc_feature 1..5: note = RNA
  misc_feature 16..20: note = RNA
  misc_feature 6..15: note = DNA
ttgcttcctcagctgtacga

SEQ ID NO: 455 - DNA, 20 bp, synthetic construct
  source 1..20: mol_type = other DNA
  modified_base 1: mod_base = OTHER; note = 2'-O-methylcytidine-3'-phosphorothioate
  modified_base 2: mod_base = OTHER; note = 2'-O-methyluridine-3'-phosphorothioate
  modified_base 3: mod_base = OTHER; note = 2'-O-methyluridine-3'-phosphorothioate
  modified_base 4: mod_base = OTHER; note = 2'-O-methyladenosine-3'-phosphorothioate
  modified_base 5: mod_base = OTHER; note = 2'-O-methyladenosine-3'-phosphorothioate
  modified_base 6: mod_base = OTHER; note = 2'-deoxythymidine-3'-phosphorothioate
  modified_base 7: mod_base = OTHER; note = 5'-methyl-deoxycytidine-3'-phosphorothioate
  modified_base 8: mod_base = OTHER; note = 2'-deoxythymidine-3'-phosphorothioate
  modified_base 9: mod_base = OTHER; note = 2'-deoxyguanosine-3'-phosphorothioate
  modified_base 10: mod_base = OTHER; note = 2'-deoxythymidine-3'-phosphorothioate
  modified_base 11: mod_base = OTHER; note = 2'-deoxythymidine-3'-phosphorothioate
  modified_base 12: mod_base = OTHER; note = 2'-deoxythymidine-3'-phosphorothioate
  modified_base 13: mod_base = OTHER; note = 2'-deoxyguanosine-3'-phosphorothioate
  modified_base 14: mod_base = OTHER; note = 5'-methyl-deoxycytidine-3'-phosphorothioate
  modified_base 15: mod_base = OTHER; note = 2'-deoxythymidine-3'-phosphorothioate
  modified_base 16: mod_base = OTHER; note = 2'-O-methyluridine-3'-phosphorothioate
  modified_base 17: mod_base = OTHER; note = 2'-O-methylcytidine-3'-phosphorothioate
  modified_base 18: mod_base = OTHER; note = 2'-O-methylcytidine-3'-phosphorothioate
  modified_base 19: mod_base = OTHER; note = 2'-O-methyluridine-3'-phosphorothioate
  modified_base 20: mod_base = OTHER; note = 2'-O-methylcytidine
  misc_feature 1..5: note = RNA
  misc_feature 16..20: note = RNA
  misc_feature 6..15: note = DNA
cttaatctgtttgcttcctc

SEQ ID NO: 456 - DNA, 20 bp, synthetic construct
  source 1..20: mol_type = other DNA
  modified_base 1: mod_base = OTHER; note = 2'-O-methyluridine-3'-phosphorothioate
  modified_base 2: mod_base = OTHER; note = 2'-O-methylguanosine-3'-phosphorothioate
  modified_base 3: mod_base = OTHER; note = 2'-O-methylguanosine-3'-phosphorothioate
  modified_base 4: mod_base = OTHER; note = 2'-O-methylguanosine-3'-phosphorothioate
  modified_base 5: mod_base = OTHER; note = 2'-O-methylcytidine-3'-phosphorothioate
  modified_base 6: mod_base = OTHER; note = 2'-deoxyadenosine-3'-phosphorothioate
  modified_base 7: mod_base = OTHER; note = 2'-deoxyadenosine-3'-phosphorothioate
  modified_base 8: mod_base = OTHER; note = 2'-deoxyguanosine-3'-phosphorothioate
  modified_base 9: mod_base = OTHER; note = 2'-deoxythymidine-3'-phosphorothioate
  modified_base 10: mod_base = OTHER; note = 2'-deoxythymidine-3'-phosphorothioate
  modified_base 11: mod_base = OTHER; note = 2'-deoxyadenosine-3'-phosphorothioate
  modified_base 12: mod_base = OTHER; note = 5'-methyl-deoxycytidine-3'-phosphorothioate
  modified_base 13: mod_base = OTHER; note = 2'-deoxythymidine-3'-phosphorothioate
  modified_base 14: mod_base = OTHER; note = 2'-deoxythymidine-3'-phosphorothioate
  modified_base 15: mod_base = OTHER; note = 2'-deoxyadenosine-3'-phosphorothioate
  modified_base 16: mod_base = OTHER; note = 2'-O-methyladenosine-3'-phosphorothioate
  modified_base 17: mod_base = OTHER; note = 2'-O-methyluridine-3'-phosphorothioate
  modified_base 18: mod_base = OTHER; note = 2'-O-methylcytidine-3'-phosphorothioate
  modified_base 19: mod_base = OTHER; note = 2'-O-methyluridine-3'-phosphorothioate
  modified_base 20: mod_base = OTHER; note = 2'-O-methylguanosine
  misc_feature 1..5: note = RNA
  misc_feature 16..20: note = RNA
  misc_feature 6..15: note = DNA
tgggcaagttacttaatctg

SEQ ID NO: 457 - DNA, 20 bp, synthetic construct
  source 1..20: mol_type = other DNA
  modified_base 1: mod_base = OTHER; note = 2'-O-methyluridine-3'-phosphorothioate
  modified_base 2: mod_base = OTHER; note = 2'-O-methyladenosine-3'-phosphorothioate
  modified_base 3: mod_base = OTHER; note = 2'-O-methyluridine-3'-phosphorothioate
  modified_base 4: mod_base = OTHER; note = 2'-O-methyluridine-3'-phosphorothioate
  modified_base 5: mod_base = OTHER; note = 2'-O-methyluridine-3'-phosphorothioate
  modified_base 6: mod_base = OTHER; note = 2'-deoxyadenosine-3'-phosphorothioate
  modified_base 7: mod_base = OTHER; note = 5'-methyl-deoxycytidine-3'-phosphorothioate
  modified_base 8: mod_base = OTHER; note = 2'-deoxythymidine-3'-phosphorothioate
  modified_base 9: mod_base = OTHER; note = 2'-deoxyguanosine-3'-phosphorothioate
  modified_base 10: mod_base = OTHER; note = 2'-deoxyguanosine-3'-phosphorothioate
  modified_base 11: mod_base = OTHER; note = 2'-deoxythymidine-3'-phosphorothioate
  modified_base 12: mod_base = OTHER; note = 2'-deoxythymidine-3'-phosphorothioate
  modified_base 13: mod_base = OTHER; note = 2'-deoxythymidine-3'-phosphorothioate
  modified_base 14: mod_base = OTHER; note = 2'-deoxyguanosine-3'-phosphorothioate
  modified_base 15: mod_base = OTHER; note = 2'-deoxyguanosine-3'-phosphorothioate
  modified_base 16: mod_base = OTHER; note = 2'-O-methylguanosine-3'-phosphorothioate
  modified_base 17: mod_base = OTHER; note = 2'-O-methylcytidine-3'-phosphorothioate
  modified_base 18: mod_base = OTHER; note = 2'-O-methyladenosine-3'-phosphorothioate
  modified_base 19: mod_base = OTHER; note = 2'-O-methyladenosine-3'-phosphorothioate
  modified_base 20: mod_base = OTHER; note = 2'-O-methylguanosine
  misc_feature 1..5: note = RNA
  misc_feature 16..20: note = RNA
  misc_feature 6..15: note = DNA
tatttactggtttgggcaag

SEQ ID NO: 458 - DNA, 20 bp, synthetic construct
  source 1..20: mol_type = other DNA
  modified_base 1: mod_base = OTHER; note = 2'-O-methyluridine-3'-phosphorothioate
  modified_base 2: mod_base = OTHER; note = 2'-O-methylguanosine-3'-phosphorothioate
  modified_base 3: mod_base = OTHER; note = 2'-O-methyladenosine-3'-phosphorothioate
  modified_base 4: mod_base = OTHER; note = 2'-O-methylguanosine-3'-phosphorothioate
  modified_base 5: mod_base = OTHER; note = 2'-O-methylguanosine-3'-phosphorothioate
  modified_base 6: mod_base = OTHER; note = 2'-deoxythymidine-3'-phosphorothioate
  modified_base 7: mod_base = OTHER; note = 5'-methyl-deoxycytidine-3'-phosphorothioate
  modified_base 8: mod_base = OTHER; note = 2'-deoxythymidine-3'-phosphorothioate
  modified_base 9: mod_base = OTHER; note = 2'-deoxyguanosine-3'-phosphorothioate
  modified_base 10: mod_base = OTHER; note = 5'-methyl-deoxycytidine-3'-phosphorothioate
  modified_base 11: mod_base = OTHER; note = 2'-deoxythymidine-3'-phosphorothioate
  modified_base 12: mod_base = OTHER; note = 2'-deoxyadenosine-3'-phosphorothioate
  modified_base 13: mod_base = OTHER; note = 2'-deoxythymidine-3'-phosphorothioate
  modified_base 14: mod_base = OTHER; note = 2'-deoxythymidine-3'-phosphorothioate
  modified_base 15: mod_base = OTHER; note = 2'-deoxythymidine-3'-phosphorothioate
  modified_base 16: mod_base = OTHER; note = 2'-O-methyladenosine-3'-phosphorothioate
  modified_base 17: mod_base = OTHER; note = 2'-O-methylcytidine-3'-phosphorothioate
  modified_base 18: mod_base = OTHER; note = 2'-O-methyluridine-3'-phosphorothioate
  modified_base 19: mod_base = OTHER; note = 2'-O-methylguanosine-3'-phosphorothioate
  modified_base 20: mod_base = OTHER; note = 2'-O-methylguanosine
  misc_feature 1..5: note = RNA
  misc_feature 16..20: note = RNA
  misc_feature 6..15: note = DNA
tgaggtctgctatttactgg

SEQ ID NO: 459 - DNA, 20 bp, synthetic construct
  source 1..20: mol_type = other DNA
  modified_base 1: mod_base = OTHER; note = 2'-O-methylguanosine-3'-phosphorothioate
  modified_base 2: mod_base = OTHER; note = 2'-O-methyluridine-3'-phosphorothioate
  modified_base 3: mod_base = OTHER; note = 2'-O-methylguanosine-3'-phosphorothioate
  modified_base 4: mod_base = OTHER; note = 2'-O-methylguanosine-3'-phosphorothioate
  modified_base 5: mod_base = OTHER; note = 2'-O-methylguanosine-3'-phosphorothioate
  modified_base 6: mod_base = OTHER; note = 2'-deoxythymidine-3'-phosphorothioate
  modified_base 7: mod_base = OTHER; note = 2'-deoxyguanosine-3'-phosphorothioate
  modified_base 8: mod_base = OTHER; note = 2'-deoxyguanosine-3'-phosphorothioate
  modified_base 9: mod_base = OTHER; note = 5'-methyl-deoxycytidine-3'-phosphorothioate
  modified_base 10: mod_base = OTHER; note = 2'-deoxyadenosine-3'-phosphorothioate
  modified_base 11: mod_base = OTHER; note = 2'-deoxyguanosine-3'-phosphorothioate
  modified_base 12: mod_base = OTHER; note = 2'-deoxythymidine-3'-phosphorothioate
  modified_base 13: mod_base = OTHER; note = 5'-methyl-deoxycytidine-3'-phosphorothioate
  modified_base 14: mod_base = OTHER; note = 2'-deoxythymidine-3'-phosphorothioate
  modified_base 15: mod_base = OTHER; note = 2'-deoxyguanosine-3'-phosphorothioate
  modified_base 16: mod_base = OTHER; note = 2'-O-methyladenosine-3'-phosphorothioate
  modified_base 17: mod_base = OTHER; note = 2'-O-methylguanosine-3'-phosphorothioate
  modified_base 18: mod_base = OTHER; note = 2'-O-methylguanosine-3'-phosphorothioate
  modified_base 19: mod_base = OTHER; note = 2'-O-methyluridine-3'-phosphorothioate
  modified_base 20: mod_base = OTHER; note = 2'-O-methylcytidine
  misc_feature 1..5: note = RNA
  misc_feature 16..20: note = RNA
  misc_feature 6..15: note = DNA
gtgggtggcagtctgaggtc

SEQ ID NO: 460 - DNA, 20 bp, synthetic construct
  source 1..20: mol_type = other DNA
  modified_base 1: mod_base = OTHER; note = 2'-O-methyladenosine-3'-phosphorothioate
  modified_base 2: mod_base = OTHER; note = 2'-O-methyladenosine-3'-phosphorothioate
  modified_base 3: mod_base = OTHER; note = 2'-O-methyladenosine-3'-phosphorothioate
  modified_base 4: mod_base = OTHER; note = 2'-O-methyladenosine-3'-phosphorothioate
  modified_base 5: mod_base = OTHER; note = 2'-O-methylguanosine-3'-phosphorothioate
  modified_base 6: mod_base = OTHER; note = 2'-deoxyguanosine-3'-phosphorothioate
  modified_base 7: mod_base = OTHER; note = 2'-deoxyadenosine-3'-phosphorothioate
  modified_base 8: mod_base = OTHER; note = 5'-methyl-deoxycytidine-3'-phosphorothioate
  modified_base 9: mod_base = OTHER; note = 2'-deoxyadenosine-3'-phosphorothioate
  modified_base 10: mod_base = OTHER; note = 2'-deoxyguanosine-3'-phosphorothioate
  modified_base 11: mod_base = OTHER; note = 2'-deoxythymidine-3'-phosphorothioate
  modified_base 12: mod_base = OTHER; note = 2'-deoxyguanosine-3'-phosphorothioate
  modified_base 13: mod_base = OTHER; note = 2'-deoxyguanosine-3'-phosphorothioate
  modified_base 14: mod_base = OTHER; note = 2'-deoxyguanosine-3'-phosphorothioate
  modified_base 15: mod_base = OTHER; note = 2'-deoxythymidine-3'-phosphorothioate
  modified_base 16: mod_base = OTHER; note = 2'-O-methylguanosine-3'-phosphorothioate
  modified_base 17: mod_base = OTHER; note = 2'-O-methylguanosine-3'-phosphorothioate
  modified_base 18: mod_base = OTHER; note = 2'-O-methylcytidine-3'-phosphorothioate
  modified_base 19: mod_base = OTHER; note = 2'-O-methyladenosine-3'-phosphorothioate
  modified_base 20: mod_base = OTHER; note = 2'-O-methylguanosine
  misc_feature 1..5: note = RNA
  misc_feature 16..20: note = RNA
  misc_feature 6..15: note = DNA
aaaaggacagtgggtggcag

SEQ ID NO: 461 - DNA, 20 bp, synthetic construct
  source 1..20: mol_type = other DNA
  modified_base 1: mod_base = OTHER; note = 2'-O-methyladenosine-3'-phosphorothioate
  modified_base 2: mod_base = OTHER; note = 2'-O-methyladenosine-3'-phosphorothioate
  modified_base 3: mod_base = OTHER; note = 2'-O-methyladenosine-3'-phosphorothioate
  modified_base 4: mod_base = OTHER; note = 2'-O-methyluridine-3'-phosphorothioate
  modified_base 5: mod_base = OTHER; note = 2'-O-methyluridine-3'-phosphorothioate
  modified_base 6: mod_base = OTHER; note = 2'-deoxyguanosine-3'-phosphorothioate
  modified_base 7: mod_base = OTHER; note = 2'-deoxythymidine-3'-phosphorothioate
  modified_base 8: mod_base = OTHER; note = 2'-deoxyadenosine-3'-phosphorothioate
  modified_base 9: mod_base = OTHER; note = 2'-deoxythymidine-3'-phosphorothioate
  modified_base 10: mod_base = OTHER; note = 2'-deoxythymidine-3'-phosphorothioate
  modified_base 11: mod_base = OTHER; note = 2'-deoxyadenosine-3'-phosphorothioate
  modified_base 12: mod_base = OTHER; note = 2'-deoxythymidine-3'-phosphorothioate
  modified_base 13: mod_base = OTHER; note = 2'-deoxyadenosine-3'-phosphorothioate
  modified_base 14: mod_base = OTHER; note = 2'-deoxyadenosine-3'-phosphorothioate
  modified_base 15: mod_base = OTHER; note = 2'-deoxyadenosine-3'-phosphorothioate
  modified_base 16: mod_base = OTHER; note = 2'-O-methyladenosine-3'-phosphorothioate
  modified_base 17: mod_base = OTHER; note = 2'-O-methylguanosine-3'-phosphorothioate
  modified_base 18: mod_base = OTHER; note = 2'-O-methylguanosine-3'-phosphorothioate
  modified_base 19: mod_base = OTHER; note = 2'-O-methyladenosine-3'-phosphorothioate
  modified_base 20: mod_base = OTHER; note = 2'-O-methylcytidine
  misc_feature 1..5: note = RNA
  misc_feature 16..20: note = RNA
  misc_feature 6..15: note = DNA
aaattgtattataaaaggac

SEQ ID NO: 462 - DNA, 20 bp, synthetic construct
  source 1..20: mol_type = other DNA
  modified_base 1: mod_base = OTHER; note = 2'-O-methyladenosine-3'-phosphorothioate
  modified_base 2: mod_base = OTHER; note = 2'-O-methyladenosine-3'-phosphorothioate
  modified_base 3: mod_base = OTHER; note = 2'-O-methyluridine-3'-phosphorothioate
  modified_base 4: mod_base = OTHER; note = 2'-O-methyladenosine-3'-phosphorothioate
  modified_base 5: mod_base = OTHER; note = 2'-O-methyluridine-3'-phosphorothioate
  modified_base 6: mod_base = OTHER; note = 2'-deoxyadenosine-3'-phosphorothioate
  modified_base 7: mod_base = OTHER; note = 2'-deoxyguanosine-3'-phosphorothioate
  modified_base 8: mod_base = OTHER; note = 5'-methyl-deoxycytidine-3'-phosphorothioate
  modified_base 9: mod_base = OTHER; note = 2'-deoxythymidine-3'-phosphorothioate
  modified_base 10: mod_base = OTHER; note = 2'-deoxyguanosine-3'-phosphorothioate
  modified_base 11: mod_base = OTHER; note = 2'-deoxythymidine-3'-phosphorothioate
  modified_base 12: mod_base = OTHER; note = 2'-deoxyadenosine-3'-phosphorothioate
  modified_base 13: mod_base = OTHER; note = 2'-deoxyadenosine-3'-phosphorothioate
  modified_base 14: mod_base = OTHER; note = 2'-deoxyadenosine-3'-phosphorothioate
  modified_base 15: mod_base = OTHER; note = 2'-deoxythymidine-3'-phosphorothioate
  modified_base 16: mod_base = OTHER; note = 2'-O-methyluridine-3'-phosphorothioate
  modified_base 17: mod_base = OTHER; note = 2'-O-methylguanosine-3'-phosphorothioate
  modified_base 18: mod_base = OTHER; note = 2'-O-methyluridine-3'-phosphorothioate
  modified_base 19: mod_base = OTHER; note = 2'-O-methyladenosine-3'-phosphorothioate
  modified_base 20: mod_base = OTHER; note = 2'-O-methyluridine
  misc_feature 1..5: note = RNA
  misc_feature 16..20: note = RNA
  misc_feature 6..15: note = DNA
aatatagctgtaaattgtat

SEQ ID NO: 463 - DNA, 20 bp, synthetic construct
  source 1..20: mol_type = other DNA
  modified_base 1: mod_base = OTHER; note = 2'-O-methyluridine-3'-phosphorothioate
  modified_base 2: mod_base = OTHER; note = 2'-O-methylguanosine-3'-phosphorothioate
  modified_base 3: mod_base = OTHER; note = 2'-O-methylcytidine-3'-phosphorothioate
  modified_base 4: mod_base = OTHER; note = 2'-O-methyluridine-3'-phosphorothioate
  modified_base 5: mod_base = OTHER; note = 2'-O-methyluridine-3'-phosphorothioate
  modified_base 6: mod_base = OTHER; note = 2'-deoxyadenosine-3'-phosphorothioate
  modified_base 7: mod_base = OTHER; note = 2'-deoxyadenosine-3'-phosphorothioate
  modified_base 8: mod_base = OTHER; note = 2'-deoxyadenosine-3'-phosphorothioate
  modified_base 9: mod_base = OTHER; note = 2'-deoxyguanosine-3'-phosphorothioate
  modified_base 10: mod_base = OTHER; note = 2'-deoxythymidine-3'-phosphorothioate
  modified_base 11: mod_base = OTHER; note = 2'-deoxyadenosine-3'-phosphorothioate
  modified_base 12: mod_base = OTHER; note = 2'-deoxyadenosine-3'-phosphorothioate
  modified_base 13: mod_base = OTHER; note = 2'-deoxyadenosine-3'-phosphorothioate
  modified_base 14: mod_base = OTHER; note = 2'-deoxyadenosine-3'-phosphorothioate
  modified_base 15: mod_base = OTHER; note = 2'-deoxythymidine-3'-phosphorothioate
  modified_base 16: mod_base = OTHER; note = 2'-O-methyladenosine-3'-phosphorothioate
  modified_base 17: mod_base = OTHER; note = 2'-O-methyluridine-3'-phosphorothioate
  modified_base 18: mod_base = OTHER; note = 2'-O-methyladenosine-3'-phosphorothioate
  modified_base 19: mod_base = OTHER; note = 2'-O-methylguanosine-3'-phosphorothioate
  modified_base 20: mod_base = OTHER; note = 2'-O-methylcytidine
  misc_feature 1..5: note = RNA
  misc_feature 16..20: note = RNA
  misc_feature 6..15: note = DNA
tgcttaaagtaaaatatagc

SEQ ID NO: 464 - DNA, 20 bp, synthetic construct
  source 1..20: mol_type = other DNA
  modified_base 1: mod_base = OTHER; note = 2'-O-methyladenosine-3'-phosphorothioate
  modified_base 2: mod_base = OTHER; note = 2'-O-methyladenosine-3'-phosphorothioate
  modified_base 3: mod_base = OTHER; note = 2'-O-methyluridine-3'-phosphorothioate
  modified_base 4: mod_base = OTHER; note = 2'-O-methyladenosine-3'-phosphorothioate
  modified_base 5: mod_base = OTHER; note = 2'-O-methyladenosine-3'-phosphorothioate
  modified_base 6: mod_base = OTHER; note = 2'-deoxyadenosine-3'-phosphorothioate
  modified_base 7: mod_base = OTHER; note = 2'-deoxyadenosine-3'-phosphorothioate
  modified_base 8: mod_base = OTHER; note = 2'-deoxyguanosine-3'-phosphorothioate
  modified_base 9: mod_base = OTHER; note = 2'-deoxyadenosine-3'-phosphorothioate
  modified_base 10: mod_base = OTHER; note = 2'-deoxyadenosine-3'-phosphorothioate
  modified_base 11: mod_base = OTHER; note = 2'-deoxythymidine-3'-phosphorothioate
  modified_base 12: mod_base = OTHER; note = 2'-deoxythymidine-3'-phosphorothioate
  modified_base 13: mod_base = OTHER; note = 2'-deoxyguanosine-3'-phosphorothioate
  modified_base 14: mod_base = OTHER; note = 5'-methyl-deoxycytidine-3'-phosphorothioate
  modified_base 15: mod_base = OTHER; note = 2'-deoxythymidine-3'-phosphorothioate
  modified_base 16: mod_base = OTHER; note = 2'-O-methyluridine-3'-phosphorothioate
  modified_base 17: mod_base = OTHER; note = 2'-O-methyladenosine-3'-phosphorothioate
  modified_base 18: mod_base = OTHER; note = 2'-O-methyladenosine-3'-phosphorothioate
  modified_base 19: mod_base = OTHER; note = 2'-O-methyladenosine-3'-phosphorothioate
  modified_base 20: mod_base = OTHER; note = 2'-O-methylguanosine
  misc_feature 1..5: note = RNA
  misc_feature 16..20: note = RNA
  misc_feature 6..15: note = DNA
aataaaagaattgcttaaag

SEQ ID NO: 465 - DNA, 20 bp, synthetic construct
  source 1..20: mol_type = other DNA
  modified_base 1: mod_base = OTHER; note = 2'-O-methyladenosine-3'-phosphorothioate
  modified_base 2: mod_base = OTHER; note = 2'-O-methyladenosine-3'-phosphorothioate
  modified_base 3: mod_base = OTHER; note = 2'-O-methyluridine-3'-phosphorothioate
  modified_base 4: mod_base = OTHER; note = 2'-O-methylguanosine-3'-phosphorothioate
  modified_base 5: mod_base = OTHER; note = 2'-O-methylguanosine-3'-phosphorothioate
  modified_base 6: mod_base = OTHER; note = 2'-deoxythymidine-3'-phosphorothioate
  modified_base 7: mod_base = OTHER; note = 2'-deoxythymidine-3'-phosphorothioate
  modified_base 8: mod_base = OTHER; note = 2'-deoxythymidine-3'-phosphorothioate
  modified_base 9: mod_base = OTHER; note = 2'-deoxythymidine-3'-phosphorothioate
  modified_base 10: mod_base = OTHER; note = 2'-deoxythymidine-3'-phosphorothioate
  modified_base 11: mod_base = OTHER; note = 2'-deoxyguanosine-3'-phosphorothioate
  modified_base 12: mod_base = OTHER; note = 2'-deoxyadenosine-3'-phosphorothioate
  modified_base 13: mod_base = OTHER; note = 2'-deoxyadenosine-3'-phosphorothioate
  modified_base 14: mod_base = OTHER; note = 2'-deoxythymidine-3'-phosphorothioate
  modified_base 15: mod_base = OTHER; note = 2'-deoxyadenosine-3'-phosphorothioate
  modified_base 16: mod_base = OTHER; note = 2'-O-methyladenosine-3'-phosphorothioate
  modified_base 17: mod_base = OTHER; note = 2'-O-methyladenosine-3'-phosphorothioate
  modified_base 18: mod_base = OTHER; note = 2'-O-methyladenosine-3'-phosphorothioate
  modified_base 19: mod_base = OTHER; note = 2'-O-methylguanosine-3'-phosphorothioate
  modified_base 20: mod_base = OTHER; note = 2'-O-methyladenosine
  misc_feature 1..5: note = RNA
  misc_feature 16..20: note = RNA
  misc_feature 6..15: note = DNA
aatggtttttgaataaaaga

SEQ ID NO: 466 - DNA, 20 bp, synthetic construct
  source 1..20: mol_type = other DNA
  modified_base 1: mod_base = OTHER; note = 2'-O-methylguanosine-3'-phosphorothioate
  modified_base 2: mod_base = OTHER; note = 2'-O-methylcytidine-3'-phosphorothioate
  modified_base 3: mod_base = OTHER; note = 2'-O-methyladenosine-3'-phosphorothioate
  modified_base 4: mod_base = OTHER; note = 2'-O-methylcytidine-3'-phosphorothioate
  modified_base 5: mod_base = OTHER; note = 2'-O-methyluridine-3'-phosphorothioate
  modified_base 6: mod_base = OTHER; note = 2'-deoxythymidine-3'-phosphorothioate
  modified_base 7: mod_base = OTHER; note = 2'-deoxyadenosine-3'-phosphorothioate
  modified_base 8: mod_base = OTHER; note = 2'-deoxyadenosine-3'-phosphorothioate
  modified_base 9: mod_base = OTHER; note = 2'-deoxythymidine-3'-phosphorothioate
  modified_base 10: mod_base = OTHER; note = 2'-deoxyadenosine-3'-phosphorothioate
  modified_base 11: mod_base = OTHER; note = 2'-deoxyadenosine-3'-phosphorothioate
  modified_base 12: mod_base = OTHER; note = 2'-deoxyadenosine-3'-phosphorothioate
  modified_base 13: mod_base = OTHER; note = 2'-deoxythymidine-3'-phosphorothioate
  modified_base 14: mod_base = OTHER; note = 2'-deoxyguanosine-3'-phosphorothioate
  modified_base 15: mod_base = OTHER; note = 2'-deoxyguanosine-3'-phosphorothioate
  modified_base 16: mod_base = OTHER; note = 2'-O-methyluridine-3'-phosphorothioate
  modified_base 17: mod_base = OTHER; note = 2'-O-methyluridine-3'-phosphorothioate
  modified_base 18: mod_base = OTHER; note = 2'-O-methyluridine-3'-phosphorothioate
  modified_base 19: mod_base = OTHER; note = 2'-O-methyluridine-3'-phosphorothioate
  modified_base 20: mod_base = OTHER; note = 2'-O-methyluridine
  misc_feature 1..5: note = RNA
  misc_feature 16..20: note = RNA
  misc_feature 6..15: note = DNA
gcacttaataaatggttttt

SEQ ID NO: 467 - DNA, 20 bp, synthetic construct
  source 1..20: mol_type = other DNA
  modified_base 1: mod_base = OTHER; note = 2'-O-methyladenosine-3'-phosphorothioate
  modified_base 2: mod_base = OTHER; note = 2'-O-methyluridine-3'-phosphorothioate
  modified_base 3: mod_base = OTHER; note = 2'-O-methyladenosine-3'-phosphorothioate
  modified_base 4: mod_base = OTHER; note = 2'-O-methyluridine-3'-phosphorothioate
  modified_base 5: mod_base = OTHER; note = 2'-O-methyluridine-3'-phosphorothioate
  modified_base 6: mod_base = OTHER; note = 2'-deoxyguanosine-3'-phosphorothioate
  modified_base 7: mod_base = OTHER; note = 5'-methyl-deoxycytidine-3'-phosphorothioate
  modified_base 8: mod_base = OTHER; note = 2'-deoxyadenosine-3'-phosphorothioate
  modified_base 9: mod_base = OTHER; note = 2'-deoxyadenosine-3'-phosphorothioate
  modified_base 10: mod_base = OTHER; note = 2'-deoxyguanosine-3'-phosphorothioate
  modified_base 11: mod_base = OTHER; note = 2'-deoxyguanosine-3'-phosphorothioate
  modified_base 12: mod_base = OTHER; note = 2'-deoxyguanosine-3'-phosphorothioate
  modified_base 13: mod_base = OTHER; note = 5'-methyl-deoxycytidine-3'-phosphorothioate
  modified_base 14: mod_base = OTHER; note = 2'-deoxyadenosine-3'-phosphorothioate
  modified_base 15: mod_base = OTHER; note = 5'-methyl-deoxycytidine-3'-phosphorothioate
  modified_base 16: mod_base = OTHER; note = 2'-O-methyluridine-3'-phosphorothioate
  modified_base 17: mod_base = OTHER; note = 2'-O-methyluridine-3'-phosphorothioate
  modified_base 18: mod_base = OTHER; note = 2'-O-methyladenosine-3'-phosphorothioate
  modified_base 19: mod_base = OTHER; note = 2'-O-methyladenosine-3'-phosphorothioate
  modified_base 20: mod_base = OTHER; note = 2'-O-methyluridine
  misc_feature 1..5: note = RNA
  misc_feature 16..20: note = RNA
  misc_feature 6..15: note = DNA
atattgcaagggcacttaat

SEQ ID NO: 468 - DNA, 20 bp, synthetic construct
  source 1..20: mol_type = other DNA
  modified_base 1: mod_base = OTHER; note = 2'-O-methyladenosine-3'-phosphorothioate
  modified_base 2: mod_base = OTHER; note = 2'-O-methylcytidine-3'-phosphorothioate
  modified_base 3: mod_base = OTHER; note = 2'-O-methyladenosine-3'-phosphorothioate
  modified_base 4: mod_base = OTHER; note = 2'-O-methylguanosine-3'-phosphorothioate
  modified_base 5: mod_base = OTHER; note = 2'-O-methylcytidine-3'-phosphorothioate
  modified_base 6: mod_base = OTHER; note = 2'-deoxyguanosine-3'-phosphorothioate
  modified_base 7: mod_base = OTHER; note = 2'-deoxyadenosine-3'-phosphorothioate
  modified_base 8: mod_base = OTHER; note = 2'-deoxythymidine-3'-phosphorothioate
  modified_base 9: mod_base = OTHER; note = 2'-deoxythymidine-3'-phosphorothioate
  modified_base 10: mod_base = OTHER; note = 2'-deoxyguanosine-3'-phosphorothioate
  modified_base 11: mod_base = OTHER; note = 2'-deoxyadenosine-3'-phosphorothioate
  modified_base 12: mod_base = OTHER; note = 2'-deoxythymidine-3'-phosphorothioate
  modified_base 13: mod_base = OTHER; note = 2'-deoxyadenosine-3'-phosphorothioate
  modified_base 14: mod_base = OTHER; note = 2'-deoxythymidine-3'-phosphorothioate
  modified_base 15: mod_base = OTHER; note = 2'-deoxythymidine-3'-phosphorothioate
  modified_base 16: mod_base = OTHER; note = 2'-O-methylguanosine-3'-phosphorothioate
  modified_base 17: mod_base = OTHER; note = 2'-O-methylcytidine-3'-phosphorothioate
  modified_base 18: mod_base = OTHER; note = 2'-O-methyladenosine-3'-phosphorothioate
  modified_base 19: mod_base = OTHER; note = 2'-O-methyladenosine-3'-phosphorothioate
  modified_base 20: mod_base = OTHER; note = 2'-O-methylguanosine
  misc_feature 1..5: note = RNA
  misc_feature 16..20: note = RNA
  misc_feature 6..15: note = DNA
acagcgattgatattgcaag

SEQ ID NO: 469 - DNA, 20 bp, synthetic construct
  source 1..20: mol_type = other DNA
  modified_base 1: mod_base = OTHER; note = 2'-O-methyluridine-3'-phosphorothioate
  modified_base 2: mod_base = OTHER; note = 2'-O-methyluridine-3'-phosphorothioate
  modified_base 3: mod_base = OTHER; note = 2'-O-methylcytidine-3'-phosphorothioate
  modified_base 4: mod_base = OTHER; note = 2'-O-methyladenosine-3'-phosphorothioate
  modified_base 5: mod_base = OTHER; note = 2'-O-methyladenosine-3'-phosphorothioate
  modified_base 6: mod_base = OTHER; note = 2'-deoxythymidine-3'-phosphorothioate
  modified_base 7: mod_base = OTHER; note = 2'-deoxyguanosine-3'-phosphorothioate
  modified_base 8: mod_base = OTHER; note = 5'-methyl-deoxycytidine-3'-phosphorothioate
  modified_base 9: mod_base = OTHER; note = 5'-methyl-deoxycytidine-3'-phosphorothioate
  modified_base 10: mod_base = OTHER; note = 2'-deoxythymidine-3'-phosphorothioate
  modified_base 11: mod_base = OTHER; note = 2'-deoxyguanosine-3'-phosphorothioate
  modified_base 12: mod_base = OTHER; note = 2'-deoxyguanosine-3'-phosphorothioate
  modified_base 13: mod_base = OTHER; note = 5'-methyl-deoxycytidine-3'-phosphorothioate
  modified_base 14: mod_base = OTHER; note = 2'-deoxyadenosine-3'-phosphorothioate
  modified_base 15: mod_base = OTHER; note = 5'-methyl-deoxycytidine-3'-phosphorothioate
  modified_base 16: mod_base = OTHER; note = 2'-O-methyladenosine-3'-phosphorothioate
  modified_base 17: mod_base = OTHER; note = 2'-O-methylguanosine-3'-phosphorothioate
  modified_base 18: mod_base = OTHER; note = 2'-O-methylcytidine-3'-phosphorothioate
  modified_base 19: mod_base = OTHER; note = 2'-O-methylguanosine-3'-phosphorothioate
  modified_base 20: mod_base = OTHER; note = 2'-O-methyladenosine
  misc_feature 1..5: note = RNA
  misc_feature 16..20: note = RNA
  misc_feature 6..15: note = DNA
ttcaatgcctggcacagcga

SEQ ID NO: 470 - DNA, 20 bp, synthetic construct
  source 1..20: mol_type = other DNA
  modified_base 1: mod_base = OTHER; note = 2'-O-methyladenosine-3'-phosphorothioate
  modified_base 2: mod_base = OTHER; note = 2'-O-methyluridine-3'-phosphorothioate
  modified_base 3: mod_base = OTHER; note = 2'-O-methylcytidine-3'-phosphorothioate
  modified_base 4: mod_base = OTHER; note = 2'-O-methyluridine-3'-phosphorothioate
  modified_base 5: mod_base = OTHER; note = 2'-O-methylguanosine-3'-phosphorothioate
  modified_base 6: mod_base = OTHER; note = 2'-deoxythymidine-3'-phosphorothioate
  modified_base 7: mod_base = OTHER; note = 2'-deoxyadenosine-3'-phosphorothioate
  modified_base 8: mod_base = OTHER; note = 2'-deoxyguanosine-3'-phosphorothioate
  modified_base 9: mod_base = OTHER; note = 2'-deoxyadenosine-3'-phosphorothioate
  modified_base 10: mod_base = OTHER; note = 2'-deoxythymidine-3'-phosphorothioate
  modified_base 11: mod_base = OTHER; note = 2'-deoxythymidine-3'-phosphorothioate
  modified_base 12: mod_base = OTHER; note = 5'-methyl-deoxycytidine-3'-phosphorothioate
  modified_base 13: mod_base = OTHER; note = 2'-deoxyadenosine-3'-phosphorothioate
  modified_base 14: mod_base = OTHER; note = 2'-deoxyadenosine-3'-phosphorothioate
  modified_base 15: mod_base = OTHER; note = 2'-deoxythymidine-3'-phosphorothioate
  modified_base 16: mod_base = OTHER; note = 2'-O-methylguanosine-3'-phosphorothioate
  modified_base 17: mod_base = OTHER; note = 2'-O-methylcytidine-3'-phosphorothioate
  modified_base 18: mod_base = OTHER; note = 2'-O-methylcytidine-3'-phosphorothioate
  modified_base 19: mod_base = OTHER; note = 2'-O-methyluridine-3'-phosphorothioate
  modified_base 20: mod_base = OTHER; note = 2'-O-methylguanosine
  misc_feature 1..5: note = RNA
  misc_feature 16..20: note = RNA
  misc_feature 6..15: note = DNA
atctgtagattcaatgcctg

SEQ ID NO: 471 - DNA, 20 bp, synthetic construct
  source 1..20: mol_type = other DNA
  modified_base 1: mod_base = OTHER; note = 2'-O-methyluridine-3'-phosphorothioate
  modified_base 2: mod_base = OTHER; note = 2'-O-methylguanosine-3'-phosphorothioate
  modified_base 3: mod_base = OTHER; note = 2'-O-methyluridine-3'-phosphorothioate
  modified_base 4: mod_base = OTHER; note = 2'-O-methylcytidine-3'-phosphorothioate
  modified_base 5: mod_base = OTHER; note = 2'-O-methyluridine-3'-phosphorothioate
  modified_base 6: mod_base = OTHER; note = 2'-deoxythymidine-3'-phosphorothioate
  modified_base 7: mod_base = OTHER; note = 2'-deoxyguanosine-3'-phosphorothioate
  modified_base 8: mod_base = OTHER; note = 5'-methyl-deoxycytidine-3'-phosphorothioate
  modified_base 9: mod_base = OTHER; note = 2'-deoxythymidine-3'-phosphorothioate
  modified_base 10: mod_base = OTHER; note = 5'-methyl-deoxycytidine-3'-phosphorothioate
  modified_base 11: mod_base = OTHER; note = 2'-deoxyadenosine-3'-phosphorothioate
  modified_base 12: mod_base = OTHER; note = 5'-methyl-deoxycytidine-3'-phosphorothioate
  modified_base 13: mod_base = OTHER; note = 2'-deoxyadenosine-3'-phosphorothioate
  modified_base 14: mod_base = OTHER; note = 2'-deoxythymidine-3'-phosphorothioate
  modified_base 15: mod_base = OTHER; note = 5'-methyl-deoxycytidine-3'-phosphorothioate
  modified_base 16: mod_base = OTHER; note = 2'-O-methyluridine-3'-phosphorothioate
  modified_base 17: mod_base = OTHER; note = 2'-O-methylguanosine-3'-phosphorothioate
  modified_base 18: mod_base = OTHER; note = 2'-O-methyluridine-3'-phosphorothioate
  modified_base 19: mod_base = OTHER; note = 2'-O-methyladenosine-3'-phosphorothioate
  modified_base 20: mod_base = OTHER; note = 2'-O-methylguanosine
  misc_feature 1..5: note = RNA
  misc_feature 16..20: note = RNA
  misc_feature 6..15: note = DNA
tgtcttgctcacatctgtag

SEQ ID NO: 472 - DNA, 20 bp, synthetic construct
  source 1..20: mol_type = other DNA
  modified_base 1: mod_base = OTHER; note = 2'-O-methyladenosine-3'-phosphorothioate
  modified_base 2: mod_base = OTHER; note = 2'-O-methylcytidine-3'-phosphorothioate
  modified_base 3: mod_base = OTHER; note = 2'-O-methyladenosine-3'-phosphorothioate
  modified_base 4: mod_base = OTHER; note = 2'-O-methylguanosine-3'-phosphorothioate
  modified_base 5: mod_base = OTHER; note = 2'-O-methylguanosine-3'-phosphorothioate
  modified_base 6: mod_base = OTHER; note = 2'-deoxythymidine-3'-phosphorothioate
  modified_base 7: mod_base = OTHER; note = 2'-deoxyadenosine-3'-phosphorothioate
  modified_base 8: mod_base = OTHER; note = 5'-methyl-deoxycytidine-3'-phosphorothioate
  modified_base 9: mod_base = OTHER; note = 2'-deoxythymidine-3'-phosphorothioate
  modified_base 10: mod_base = OTHER; note = 2'-deoxythymidine-3'-phosphorothioate
  modified_base 11: mod_base = OTHER; note = 2'-deoxythymidine-3'-phosphorothioate
  modified_base 12: mod_base = OTHER; note = 2'-deoxyguanosine-3'-phosphorothioate
  modified_base 13: mod_base = OTHER; note = 2'-deoxythymidine-3'-phosphorothioate
  modified_base 14: mod_base = OTHER; note = 5'-methyl-deoxycytidine-3'-phosphorothioate
  modified_base 15: mod_base = OTHER; note = 2'-deoxythymidine-3'-phosphorothioate
  modified_base 16: mod_base = OTHER; note = 2'-O-methyluridine-3'-phosphorothioate
  modified_base 17: mod_base = OTHER; note = 2'-O-methylguanosine-3'-phosphorothioate
  modified_base 18: mod_base = OTHER; note = 2'-O-methylcytidine-3'-phosphorothioate
  modified_base 19: mod_base = OTHER; note = 2'-O-methyluridine-3'-phosphorothioate
  modified_base 20: mod_base = OTHER; note = 2'-O-methylcytidine
  misc_feature 1..5: note = RNA
  misc_feature 16..20: note = RNA
  misc_feature 6..15: note = DNA
acaggtactttgtcttgctc

SEQ ID NO: 473 - DNA, 20 bp, synthetic construct
  source 1..20: mol_type = other DNA
  modified_base 1: mod_base = OTHER; note = 2'-O-methyladenosine-3'-phosphorothioate
  modified_base 2: mod_base = OTHER; note = 2'-O-methylguanosine-3'-phosphorothioate
  modified_base 3: mod_base = OTHER; note = 2'-O-methylcytidine-3'-phosphorothioate
  modified_base 4: mod_base = OTHER; note = 2'-O-methyluridine-3'-phosphorothioate
  modified_base 5: mod_base = OTHER; note = 2'-O-methylcytidine-3'-phosphorothioate
  modified_base 6: mod_base = OTHER; note = 5'-methyl-deoxycytidine-3'-phosphorothioate
  modified_base 7: mod_base = OTHER; note = 2'-deoxythymidine-3'-phosphorothioate
  modified_base 8: mod_base = OTHER; note = 2'-deoxythymidine-3'-phosphorothioate
  modified_base 9: mod_base = OTHER; note = 2'-deoxyguanosine-3'-phosphorothioate
  modified_base 10: mod_base = OTHER; note = 2'-deoxyadenosine-3'-phosphorothioate
  modified_base 11: mod_base = OTHER; note = 2'-deoxyguanosine-3'-phosphorothioate
  modified_base 12: mod_base = OTHER; note = 2'-deoxyguanosine-3'-phosphorothioate
  modified_base 13: mod_base = OTHER; note = 2'-deoxyadenosine-3'-phosphorothioate
  modified_base 14: mod_base = OTHER; note = 5'-methyl-deoxycytidine-3'-phosphorothioate
  modified_base 15: mod_base = OTHER; note = 2'-deoxyadenosine-3'-phosphorothioate
  modified_base 16: mod_base = OTHER; note = 2'-O-methylguanosine-3'-phosphorothioate
  modified_base 17: mod_base = OTHER; note = 2'-O-methylguanosine-3'-phosphorothioate
  modified_base 18: mod_base = OTHER; note = 2'-O-methyluridine-3'-phosphorothioate
  modified_base 19: mod_base = OTHER; note = 2'-O-methyladenosine-3'-phosphorothioate
  modified_base 20: mod_base = OTHER; note = 2'-O-methylcytidine
  misc_feature 1..5: note = RNA
  misc_feature 16..20: note = RNA
  misc_feature 6..15: note = DNA
agctccttgaggacaggtac

SEQ ID NO: 474 - DNA, 20 bp, synthetic construct
  source 1..20: mol_type = other DNA
  modified_base 1: mod_base = OTHER; note = 2'-O-methyladenosine-3'-phosphorothioate
  modified_base 2: mod_base = OTHER; note = 2'-O-methyluridine-3'-phosphorothioate
  modified_base 3: mod_base = OTHER; note = 2'-O-methyluridine-3'-phosphorothioate
  modified_base 4: mod_base = OTHER; note = 2'-O-methyladenosine-3'-phosphorothioate
  modified_base 5: mod_base = OTHER; note = 2'-O-methyluridine-3'-phosphorothioate
  modified_base 6: mod_base = OTHER; note = 2'-deoxyadenosine-3'-phosphorothioate
  modified_base 7: mod_base = OTHER; note = 5'-methyl-deoxycytidine-3'-phosphorothioate
  modified_base 8: mod_base = OTHER; note = 2'-deoxythymidine-3'-phosphorothioate
  modified_base 9: mod_base = OTHER; note = 2'-deoxyadenosine-3'-phosphorothioate
  modified_base 10: mod_base = OTHER; note = 2'-deoxythymidine-3'-phosphorothioate
  modified_base 11: mod_base = OTHER; note = 2'-deoxyguanosine-3'-phosphorothioate
  modified_base 12: mod_base = OTHER; note = 2'-deoxyadenosine-3'-phosphorothioate
  modified_base 13: mod_base = OTHER; note = 2'-deoxyguanosine-3'-phosphorothioate
  modified_base 14: mod_base = OTHER; note = 5'-methyl-deoxycytidine-3'-phosphorothioate
  modified_base 15: mod_base = OTHER; note = 2'-deoxythymidine-3'-phosphorothioate
  modified_base 16: mod_base = OTHER; note = 2'-O-methylcytidine-3'-phosphorothioate
  modified_base 17: mod_base = OTHER; note = 2'-O-methylcytidine-3'-phosphorothioate
  modified_base 18: mod_base = OTHER; note = 2'-O-methyluridine-3'-phosphorothioate
  modified_base 19: mod_base = OTHER; note = 2'-O-methyluridine-3'-phosphorothioate
  modified_base 20: mod_base = OTHER; note = 2'-O-methylguanosine
  misc_feature 1..5: note = RNA
  misc_feature 16..20: note = RNA
  misc_feature 6..15: note = DNA
attatactatgagctccttg

SEQ ID NO: 475 - DNA, 20 bp, synthetic construct
  source 1..20: mol_type = other DNA
  modified_base 1: mod_base = OTHER; note = 2'-O-methyluridine-3'-phosphorothioate
  modified_base 2: mod_base = OTHER; note = 2'-O-methyladenosine-3'-phosphorothioate
  modified_base 3: mod_base = OTHER; note = 2'-O-methyladenosine-3'-phosphorothioate
  modified_base 4: mod_base = OTHER; note = 2'-O-methyluridine-3'-phosphorothioate
  modified_base 5: mod_base = OTHER; note = 2'-O-methylcytidine-3'-phosphorothioate
  modified_base 6: mod_base = OTHER; note = 2'-deoxythymidine-3'-phosphorothioate
  modified_base 7: mod_base = OTHER; note = 5'-methyl-deoxycytidine-3'-phosphorothioate
  modified_base 8: mod_base = OTHER; note = 5'-methyl-deoxycytidine-3'-phosphorothioate
  modified_base 9: mod_base = OTHER; note = 2'-deoxythymidine-3'-phosphorothioate
  modified_base 10: mod_base = OTHER; note = 5'-methyl-deoxycytidine-3'-phosphorothioate
  modified_base 11: mod_base = OTHER; note = 2'-deoxyadenosine-3'-phosphorothioate
  modified_base 12: mod_base = OTHER; note = 2'-deoxythymidine-3'-phosphorothioate
  modified_base 13: mod_base = OTHER; note = 2'-deoxythymidine-3'-phosphorothioate
  modified_base 14: mod_base = OTHER; note = 2'-deoxyadenosine-3'-phosphorothioate
  modified_base 15: mod_base = OTHER; note = 2'-deoxythymidine-3'-phosphorothioate
  modified_base 16: mod_base = OTHER; note = 2'-O-methyladenosine-3'-phosphorothioate
  modified_base 17: mod_base = OTHER; note = 2'-O-methylcytidine-3'-phosphorothioate
  modified_base 18: mod_base = OTHER; note = 2'-O-methyluridine-3'-phosphorothioate
  modified_base 19: mod_base = OTHER; note = 2'-O-methyladenosine-3'-phosphorothioate
  modified_base 20: mod_base = OTHER; note = 2'-O-methyluridine
  misc_feature 1..5: note = RNA
  misc_feature 16..20: note = RNA
  misc_feature 6..15: note = DNA
taatctcctcattatactat

SEQ ID NO: 476 - DNA, 20 bp, synthetic construct
  source 1..20: mol_type = other DNA
  modified_base 1: mod_base = OTHER; note = 2'-O-methyladenosine-3'-phosphorothioate
  modified_base 2: mod_base = OTHER; note = 2'-O-methylcytidine-3'-phosphorothioate
  modified_base 3: mod_base = OTHER; note = 2'-O-methyladenosine-3'-phosphorothioate
  modified_base 4: mod_base = OTHER; note = 2'-O-methyluridine-3'-phosphorothioate
  modified_base 5: mod_base = OTHER; note = 2'-O-methyluridine-3'-phosphorothioate
  modified_base 6: mod_base = OTHER; note = 2'-deoxythymidine-3'-phosphorothioate
  modified_base 7: mod_base = OTHER; note = 2'-deoxythymidine-3'-phosphorothioate
  modified_base 8: mod_base = OTHER; note = 5'-methyl-deoxycytidine-3'-phosphorothioate
  modified_base 9: mod_base = OTHER; note = 2'-deoxythymidine-3'-phosphorothioate
  modified_base 10: mod_base = OTHER; note = 2'-deoxythymidine-3'-phosphorothioate
  modified_base 11: mod_base = OTHER; note = 2'-deoxyguanosine-3'-phosphorothioate
  modified_base 12: mod_base = OTHER; note = 2'-deoxythymidine-3'-phosphorothioate
  modified_base 13: mod_base = OTHER; note = 2'-deoxythymidine-3'-phosphorothioate
  modified_base 14: mod_base = OTHER; note = 2'-deoxyadenosine-3'-phosphorothioate
  modified_base 15: mod_base = OTHER; note = 2'-deoxyadenosine-3'-phosphorothioate
  modified_base 16: mod_base = OTHER; note = 2'-O-methyluridine-3'-phosphorothioate
  modified_base 17: mod_base = OTHER; note = 2'-O-methylcytidine-3'-phosphorothioate
  modified_base 18: mod_base = OTHER; note = 2'-O-methyluridine-3'-phosphorothioate
  modified_base 19: mod_base = OTHER; note = 2'-O-methylcytidine-3'-phosphorothioate
  modified_base 20: mod_base = OTHER; note = 2'-O-methylcytidine
  misc_feature 1..5: note = RNA
  misc_feature 16..20: note = RNA
  misc_feature 6..15: note = DNA
acattttcttgttaatctcc

SEQ ID NO: 477 - DNA, 20 bp, synthetic construct
  source 1..20: mol_type = other DNA
  modified_base 1: mod_base = OTHER; note = 2'-O-methyladenosine-3'-phosphorothioate
  modified_base 2: mod_base = OTHER; note = 2'-O-methyladenosine-3'-phosphorothioate
  modified_base 3: mod_base = OTHER; note = 2'-O-methyluridine-3'-phosphorothioate
  modified_base 4: mod_base = OTHER; note = 2'-O-methyluridine-3'-phosphorothioate
  modified_base 5: mod_base = OTHER; note = 2'-O-methylguanosine-3'-phosphorothioate
  modified_base 6: mod_base = OTHER; note = 2'-deoxythymidine-3'-phosphorothioate
  modified_base 7: mod_base = OTHER; note = 2'-deoxyadenosine-3'-phosphorothioate
  modified_base 8: mod_base = OTHER; note = 2'-deoxyadenosine-3'-phosphorothioate
  modified_base 9: mod_base = OTHER; note = 2'-deoxythymidine-3'-phosphorothioate
  modified_base 10: mod_base = OTHER; note = 2'-deoxyadenosine-3'-phosphorothioate
  modified_base 11: mod_base = OTHER; note = 2'-deoxyadenosine-3'-phosphorothioate
  modified_base 12: mod_base = OTHER; note = 2'-deoxythymidine-3'-phosphorothioate
  modified_base 13: mod_base = OTHER; note = 2'-deoxyadenosine-3'-phosphorothioate
  modified_base 14: mod_base = OTHER; note = 5'-methyl-deoxycytidine-3'-phosphorothioate
  modified_base 15: mod_base = OTHER; note = 2'-deoxyadenosine-3'-phosphorothioate
  modified_base 16: mod_base = OTHER; note = 2'-O-methyluridine-3'-phosphorothioate
  modified_base 17: mod_base = OTHER; note = 2'-O-methyluridine-3'-phosphorothioate
  modified_base 18: mod_base = OTHER; note = 2'-O-methyluridine-3'-phosphorothioate
  modified_base 19: mod_base = OTHER; note = 2'-O-methyluridine-3'-phosphorothioate
  modified_base 20: mod_base = OTHER; note = 2'-O-methylcytidine
  misc_feature 1..5: note = RNA
  misc_feature 16..20: note = RNA
  misc_feature 6..15: note = DNA
aattgtaataatacattttc

SEQ ID NO: 478 - DNA, 20 bp, synthetic construct
  source 1..20: mol_type = other DNA
  modified_base 1: mod_base = OTHER; note = 2'-O-methyladenosine-3'-phosphorothioate
  modified_base 2: mod_base = OTHER; note = 2'-O-methylcytidine-3'-phosphorothioate
  modified_base 3: mod_base = OTHER; note = 2'-O-methyladenosine-3'-phosphorothioate
  modified_base 4: mod_base = OTHER; note = 2'-O-methylcytidine-3'-phosphorothioate
  modified_base 5: mod_base = OTHER; note = 2'-O-methyluridine-3'-phosphorothioate
  modified_base 6: mod_base = OTHER; note = 2'-deoxyguanosine-3'-phosphorothioate
  modified_base 7: mod_base = OTHER; note = 2'-deoxyguanosine-3'-phosphorothioate
  modified_base 8: mod_base = OTHER; note = 2'-deoxyadenosine-3'-phosphorothioate
  modified_base 9: mod_base = OTHER; note = 5'-methyl-deoxycytidine-3'-phosphorothioate
  modified_base 10: mod_base = OTHER; note = 2'-deoxythymidine-3'-phosphorothioate
  modified_base 11: mod_base = OTHER; note = 2'-deoxyadenosine-3'-phosphorothioate
  modified_base 12: mod_base = OTHER; note = 2'-deoxyadenosine-3'-phosphorothioate
  modified_base 13: mod_base = OTHER; note = 2'-deoxyadenosine-3'-phosphorothioate
  modified_base 14: mod_base = OTHER; note = 2'-deoxythymidine-3'-phosphorothioate
  modified_base 15: mod_base = OTHER; note = 2'-deoxythymidine-3'-phosphorothioate
  modified_base 16: mod_base = OTHER; note = 2'-O-methylguanosine-3'-phosphorothioate
  modified_base 17: mod_base = OTHER; note = 2'-O-methyluridine-3'-phosphorothioate
  modified_base 18: mod_base = OTHER; note = 2'-O-methyladenosine-3'-phosphorothioate
  modified_base 19: mod_base = OTHER; note = 2'-O-methyladenosine-3'-phosphorothioate
  modified_base 20: mod_base = OTHER; note = 2'-O-methyluridine
  misc_feature 1..5: note = RNA
  misc_feature 16..20: note = RNA
  misc_feature 6..15: note = DNA
acactggactaaattgtaat

SEQ ID NO: 479 - DNA, 20 bp, synthetic construct
  source 1..20: mol_type = other DNA
  modified_base 1: mod_base = OTHER; note = 2'-O-methyluridine-3'-phosphorothioate
  modified_base 2: mod_base = OTHER; note = 2'-O-methyladenosine-3'-phosphorothioate
  modified_base 3: mod_base = OTHER; note = 2'-O-methyluridine-3'-phosphorothioate
  modified_base 4: mod_base = OTHER; note = 2'-O-methylguanosine-3'-phosphorothioate
  modified_base 5: mod_base = OTHER; note = 2'-O-methylcytidine-3'-phosphorothioate
  modified_base 6: mod_base = OTHER; note = 2'-deoxythymidine-3'-phosphorothioate
  modified_base 7: mod_base = OTHER; note = 2'-deoxyadenosine-3'-phosphorothioate
  modified_base 8: mod_base = OTHER; note = 2'-deoxythymidine-3'-phosphorothioate
  modified_base 9: mod_base = OTHER; note = 2'-deoxyguanosine-3'-phosphorothioate
  modified_base 10: mod_base = OTHER; note = 2'-deoxyadenosine-3'-phosphorothioate
  modified_base 11: mod_base = OTHER; note = 5'-methyl-deoxycytidine-3'-phosphorothioate
  modified_base 12: mod_base = OTHER; note = 2'-deoxyadenosine-3'-phosphorothioate
  modified_base 13: mod_base = OTHER; note = 5'-methyl-deoxycytidine-3'-phosphorothioate
  modified_base 14: mod_base = OTHER; note = 2'-deoxythymidine-3'-phosphorothioate
  modified_base 15: mod_base = OTHER; note = 2'-deoxyguanosine-3'-phosphorothioate
  modified_base 16: mod_base = OTHER; note = 2'-O-methylguanosine-3'-phosphorothioate
  modified_base 17: mod_base = OTHER; note = 2'-O-methyladenosine-3'-phosphorothioate
  modified_base 18: mod_base = OTHER; note = 2'-O-methylcytidine-3'-phosphorothioate
  modified_base 19: mod_base = OTHER; note = 2'-O-methyluridine-3'-phosphorothioate
  modified_base 20: mod_base = OTHER; note = 2'-O-methyladenosine
  misc_feature 1..5: note = RNA
  misc_feature 16..20: note = RNA
  misc_feature 6..15: note = DNA
tatgctatgacactggacta

SEQ ID NO: 480 - DNA, 20 bp, synthetic construct
  source 1..20: mol_type = other DNA
  modified_base 1: mod_base = OTHER; note = 2'-O-methyluridine-3'-phosphorothioate
  modified_base 2: mod_base = OTHER; note = 2'-O-methylcytidine-3'-phosphorothioate
  modified_base 3: mod_base = OTHER; note = 2'-O-methylguanosine-3'-phosphorothioate
  modified_base 4: mod_base = OTHER; note = 2'-O-methylcytidine-3'-phosphorothioate
  modified_base 5: mod_base = OTHER; note = 2'-O-methyladenosine-3'-phosphorothioate
  modified_base 6: mod_base = OTHER; note = 2'-deoxythymidine-3'-phosphorothioate
  modified_base 7: mod_base = OTHER; note = 5'-methyl-deoxycytidine-3'-phosphorothioate
  modified_base 8: mod_base = OTHER; note = 2'-deoxyadenosine-3'-phosphorothioate
  modified_base 9: mod_base = OTHER; note = 2'-deoxythymidine-3'-phosphorothioate
  modified_base 10: mod_base = OTHER; note = 5'-methyl-deoxycytidine-3'-phosphorothioate
  modified_base 11: mod_base = OTHER; note = 5'-methyl-deoxycytidine-3'-phosphorothioate
  modified_base 12: mod_base = OTHER; note = 2'-deoxythymidine-3'-phosphorothioate
  modified_base 13: mod_base = OTHER; note = 2'-deoxythymidine-3'-phosphorothioate
  modified_base 14: mod_base = OTHER; note = 2'-deoxyadenosine-3'-phosphorothioate
  modified_base 15: mod_base = OTHER; note = 2'-deoxythymidine-3'-phosphorothioate
  modified_base 16: mod_base = OTHER; note = 2'-O-methylguanosine-3'-phosphorothioate
  modified_base 17: mod_base = OTHER; note = 2'-O-methylcytidine-3'-phosphorothioate
  modified_base 18: mod_base = OTHER; note = 2'-O-methyluridine-3'-phosphorothioate
  modified_base 19: mod_base = OTHER; note = 2'-O-methyladenosine-3'-phosphorothioate
  modified_base 20: mod_base = OTHER; note = 2'-O-methyluridine
  misc_feature 1..5: note = RNA
  misc_feature 16..20: note = RNA
  misc_feature 6..15: note = DNA
tcgcatcatccttatgctat

SEQ ID NO: 481 - DNA, 20 bp, synthetic construct
  source 1..20: mol_type = other DNA
  modified_base 1: mod_base = OTHER; note = 2'-O-methylguanosine-3'-phosphorothioate
  modified_base 2: mod_base = OTHER; note = 2'-O-methylguanosine-3'-phosphorothioate
  modified_base 3: mod_base = OTHER; note = 2'-O-methyluridine-3'-phosphorothioate
  modified_base 4: mod_base = OTHER; note = 2'-O-methyluridine-3'-phosphorothioate
  modified_base 5: mod_base = OTHER; note = 2'-O-methyluridine-3'-phosphorothioate
  modified_base 6: mod_base = OTHER; note = 2'-deoxythymidine-3'-phosphorothioate
  modified_base 7: mod_base = OTHER; note = 5'-methyl-deoxycytidine-3'-phosphorothioate
  modified_base 8: mod_base = OTHER; note = 5'-methyl-deoxycytidine-3'-phosphorothioate
  modified_base 9: mod_base = OTHER; note = 5'-methyl-deoxycytidine-3'-phosphorothioate
  modified_base 10: mod_base = OTHER; note = 5'-methyl-deoxycytidine-3'-phosphorothioate
  modified_base 11: mod_base = OTHER; note = 2'-deoxythymidine-3'-phosphorothioate
  modified_base 12: mod_base = OTHER; note = 5'-methyl-deoxycytidine-3'-phosphorothioate
  modified_base 13: mod_base = OTHER; note = 2'-deoxyguanosine-3'-phosphorothioate
  modified_base 14: mod_base = OTHER; note = 5'-methyl-deoxycytidine-3'-phosphorothioate
  modified_base 15: mod_base = OTHER; note = 2'-deoxyadenosine-3'-phosphorothioate
  modified_base 16: mod_base = OTHER; note = 2'-O-methyluridine-3'-phosphorothioate
  modified_base 17: mod_base = OTHER; note = 2'-O-methylcytidine-3'-phosphorothioate
  modified_base 18: mod_base = OTHER; note = 2'-O-methyladenosine-3'-phosphorothioate
  modified_base 19: mod_base = OTHER; note = 2'-O-methyluridine-3'-phosphorothioate
  modified_base 20: mod_base = OTHER; note = 2'-O-methylcytidine
  misc_feature 1..5: note = RNA
  misc_feature 16..20: note = RNA
  misc_feature 6..15: note = DNA
ggttttcccctcgcatcatc

SEQ ID NO: 482 - DNA, 20 bp, synthetic construct
  source 1..20: mol_type = other DNA
  modified_base 1: mod_base = OTHER; note = 2'-O-methyladenosine-3'-phosphorothioate
  modified_base 2: mod_base = OTHER; note = 2'-O-methyladenosine-3'-phosphorothioate
  modified_base 3: mod_base = OTHER; note = 2'-O-methylcytidine-3'-phosphorothioate
  modified_base 4: mod_base = OTHER; note = 2'-O-methyladenosine-3'-phosphorothioate
  modified_base 5: mod_base = OTHER; note = 2'-O-methylcytidine-3'-phosphorothioate
  modified_base 6: mod_base = OTHER; note = 2'-deoxythymidine-3'-phosphorothioate
  modified_base 7: mod_base = OTHER; note = 2'-deoxyguanosine-3'-phosphorothioate
  modified_base 8: mod_base = OTHER; note = 5'-methyl-deoxycytidine-3'-phosphorothioate
  modified_base 9: mod_base = OTHER; note = 2'-deoxythymidine-3'-phosphorothioate
  modified_base 10: mod_base = OTHER; note = 5'-methyl-deoxycytidine-3'-phosphorothioate
  modified_base 11: mod_base = OTHER; note = 2'-deoxyguanosine-3'-phosphorothioate
  modified_base 12: mod_base = OTHER; note = 2'-deoxyguanosine-3'-phosphorothioate
  modified_base 13: mod_base = OTHER; note = 2'-deoxyguanosine-3'-phosphorothioate
  modified_base 14: mod_base = OTHER; note = 2'-deoxythymidine-3'-phosphorothioate
  modified_base 15: mod_base = OTHER; note = 2'-deoxythymidine-3'-phosphorothioate
  modified_base 16: mod_base = OTHER; note = 2'-O-methyluridine-3'-phosphorothioate
  modified_base 17: mod_base = OTHER; note = 2'-O-methyluridine-3'-phosphorothioate
  modified_base 18: mod_base = OTHER; note = 2'-O-methylcytidine-3'-phosphorothioate
  modified_base 19: mod_base = OTHER; note = 2'-O-methylcytidine-3'-phosphorothioate
  modified_base 20: mod_base = OTHER; note = 2'-O-methylcytidine
  misc_feature 1..5: note = RNA
  misc_feature 16..20: note = RNA
  misc_feature 6..15: note = DNA
aacactgctcgggttttccc

SEQ ID NO: 483 - DNA, 20 bp, synthetic construct
  source 1..20: mol_type = other DNA
  modified_base 1: mod_base = OTHER; note = 2'-O-methylcytidine-3'-phosphorothioate
  modified_base 2: mod_base = OTHER; note = 2'-O-methylcytidine-3'-phosphorothioate
  modified_base 3: mod_base = OTHER; note = 2'-O-methyluridine-3'-phosphorothioate
  modified_base 4: mod_base = OTHER; note = 2'-O-methylcytidine-3'-phosphorothioate
  modified_base 5: mod_base = OTHER; note = 2'-O-methylcytidine-3'-phosphorothioate
  modified_base 6: mod_base = OTHER; note = 2'-deoxythymidine-3'-phosphorothioate
  modified_base 7: mod_base = OTHER; note = 5'-methyl-deoxycytidine-3'-phosphorothioate
  modified_base 8: mod_base = OTHER; note = 2'-deoxythymidine-3'-phosphorothioate
  modified_base 9: mod_base = OTHER; note = 2'-deoxythymidine-3'-phosphorothioate
  modified_base 10: mod_base = OTHER; note = 2'-deoxyguanosine-3'-phosphorothioate
  modified_base 11: mod_base = OTHER; note = 2'-deoxyguanosine-3'-phosphorothioate
  modified_base 12: mod_base = OTHER; note = 5'-methyl-deoxycytidine-3'-phosphorothioate
  modified_base 13: mod_base = OTHER; note = 2'-deoxyadenosine-3'-phosphorothioate
  modified_base 14: mod_base = OTHER; note = 2'-deoxyadenosine-3'-phosphorothioate
  modified_base 15: mod_base = OTHER; note = 5'-methyl-deoxycytidine-3'-phosphorothioate
  modified_base 16: mod_base = OTHER; note = 2'-O-methyladenosine-3'-phosphorothioate
  modified_base 17: mod_base = OTHER; note = 2'-O-methylcytidine-3'-phosphorothioate
  modified_base 18: mod_base = OTHER; note = 2'-O-methyluridine-3'-phosphorothioate
  modified_base 19: mod_base = OTHER; note = 2'-O-methylguanosine-3'-phosphorothioate
  modified_base 20: mod_base = OTHER; note = 2'-O-methylcytidine
  misc_feature 1..5: note = RNA
  misc_feature 16..20: note = RNA
  misc_feature 6..15: note = DNA
cctcctcttggcaacactgc

SEQ ID NO: 484 - DNA, 20 bp, synthetic construct
  source 1..20: mol_type = other DNA
  modified_base 1: mod_base = OTHER; note = 2'-O-methyluridine-3'-phosphorothioate
  modified_base 2: mod_base = OTHER; note = 2'-O-methylguanosine-3'-phosphorothioate
  modified_base 3: mod_base = OTHER; note = 2'-O-methylguanosine-3'-phosphorothioate
  modified_base 4: mod_base = OTHER; note = 2'-O-methylcytidine-3'-phosphorothioate
  modified_base 5: mod_base = OTHER; note = 2'-O-methylcytidine-3'-phosphorothioate
  modified_base 6: mod_base = OTHER; note = 2'-deoxythymidine-3'-phosphorothioate
  modified_base 7: mod_base = OTHER; note = 2'-deoxyadenosine-3'-phosphorothioate
  modified_base 8: mod_base = OTHER; note = 2'-deoxythymidine-3'-phosphorothioate
  modified_base 9: mod_base = OTHER; note = 2'-deoxythymidine-3'-phosphorothioate
  modified_base 10: mod_base = OTHER; note = 2'-deoxythymidine-3'-phosphorothioate
  modified_base 11: mod_base = OTHER; note = 5'-methyl-deoxycytidine-3'-phosphorothioate
  modified_base 12: mod_base = OTHER; note = 5'-methyl-deoxycytidine-3'-phosphorothioate
  modified_base 13: mod_base = OTHER; note = 2'-deoxythymidine-3'-phosphorothioate
  modified_base 14: mod_base = OTHER; note = 5'-methyl-deoxycytidine-3'-phosphorothioate
  modified_base 15: mod_base = OTHER; note = 5'-methyl-deoxycytidine-3'-phosphorothioate
  modified_base 16: mod_base = OTHER; note = 2'-O-methyluridine-3'-phosphorothioate
  modified_base 17: mod_base = OTHER; note = 2'-O-methylcytidine-3'-phosphorothioate
  modified_base 18: mod_base = OTHER; note = 2'-O-methyluridine-3'-phosphorothioate
  modified_base 19: mod_base = OTHER; note = 2'-O-methyluridine-3'-phosphorothioate
  modified_base 20: mod_base = OTHER; note = 2'-O-methylguanosine
  misc_feature 1..5: note = RNA
  misc_feature 16..20: note = RNA
  misc_feature 6..15: note = DNA
tggcctatttcctcctcttg

SEQ ID NO: 485 - DNA, 20 bp, synthetic construct
  source 1..20: mol_type = other DNA
  modified_base 1: mod_base = OTHER; note = 2'-O-methylcytidine-3'-phosphorothioate
  modified_base 2: mod_base = OTHER; note = 2'-O-methylcytidine-3'-phosphorothioate
  modified_base 3: mod_base = OTHER; note = 2'-O-methylcytidine-3'-phosphorothioate
  modified_base 4: mod_base = OTHER; note = 2'-O-methyladenosine-3'-phosphorothioate
  modified_base 5: mod_base = OTHER; note = 2'-O-methylguanosine-3'-phosphorothioate
  modified_base 6: mod_base = OTHER; note = 2'-deoxyadenosine-3'-phosphorothioate
  modified_base 7: mod_base = OTHER; note = 5'-methyl-deoxycytidine-3'-phosphorothioate
  modified_base 8: mod_base = OTHER; note = 5'-methyl-deoxycytidine-3'-phosphorothioate
  modified_base 9: mod_base = OTHER; note = 2'-deoxyadenosine-3'-phosphorothioate
  modified_base 10: mod_base = OTHER; note = 5'-methyl-deoxycytidine-3'-phosphorothioate
  modified_base 11: mod_base = OTHER; note = 2'-deoxyadenosine-3'-phosphorothioate
  modified_base 12: mod_base = OTHER; note = 2'-deoxythymidine-3'-phosphorothioate
  modified_base 13: mod_base = OTHER; note = 2'-deoxythymidine-3'-phosphorothioate
  modified_base 14: mod_base = OTHER; note = 2'-deoxyguanosine-3'-phosphorothioate
  modified_base 15: mod_base = OTHER; note = 2'-deoxyguanosine-3'-phosphorothioate
  modified_base 16: mod_base = OTHER; note = 2'-O-methylcytidine-3'-phosphorothioate
  modified_base 17: mod_base = OTHER; note = 2'-O-methylcytidine-3'-phosphorothioate
  modified_base 18: mod_base = OTHER; note = 2'-O-methyluridine-3'-phosphorothioate
  modified_base 19: mod_base = OTHER; note = 2'-O-methyladenosine-3'-phosphorothioate
  modified_base 20: mod_base = OTHER; note = 2'-O-methyluridine
  misc_feature 1..5: note = RNA
  misc_feature 16..20: note = RNA
  misc_feature 6..15: note = DNA
cccagaccacattggcctat

SEQ ID NO: 486 - DNA, 20 bp, synthetic construct
  source 1..20: mol_type = other DNA
  modified_base 1: mod_base = OTHER; note = 2'-O-methyladenosine-3'-phosphorothioate
  modified_base 2: mod_base = OTHER; note = 2'-O-methyluridine-3'-phosphorothioate
  modified_base 3: mod_base = OTHER; note = 2'-O-methyladenosine-3'-phosphorothioate
  modified_base 4: mod_base = OTHER; note = 2'-O-methyluridine-3'-phosphorothioate
  modified_base 5: mod_base = OTHER; note = 2'-O-methylcytidine-3'-phosphorothioate
  modified_base 6: mod_base = OTHER; note = 5'-methyl-deoxycytidine-3'-phosphorothioate
  modified_base 7: mod_base = OTHER; note = 2'-deoxyadenosine-3'-phosphorothioate
  modified_base 8: mod_base = OTHER; note = 2'-deoxyadenosine-3'-phosphorothioate
  modified_base 9: mod_base = OTHER; note = 5'-methyl-deoxycytidine-3'-phosphorothioate
  modified_base 10: mod_base = OTHER; note = 5'-methyl-deoxycytidine-3'-phosphorothioate
  modified_base 11: mod_base = OTHER; note = 2'-deoxyguanosine-3'-phosphorothioate
  modified_base 12: mod_base = OTHER; note = 2'-deoxythymidine-3'-phosphorothioate
  modified_base 13: mod_base = OTHER; note = 5'-methyl-deoxycytidine-3'-phosphorothioate
  modified_base 14: mod_base = OTHER; note = 5'-methyl-deoxycytidine-3'-phosphorothioate
  modified_base 15: mod_base = OTHER; note = 5'-methyl-deoxycytidine-3'-phosphorothioate
  modified_base 16: mod_base = OTHER; note = 2'-O-methyladenosine-3'-phosphorothioate
  modified_base 17: mod_base = OTHER; note = 2'-O-methylguanosine-3'-phosphorothioate
  modified_base 18: mod_base = OTHER; note = 2'-O-methyladenosine-3'-phosphorothioate
  modified_base 19: mod_base = OTHER; note = 2'-O-methylcytidine-3'-phosphorothioate
  modified_base 20: mod_base = OTHER; note = 2'-O-methylcytidine
  misc_feature 1..5: note = RNA
  misc_feature 16..20: note = RNA
  misc_feature 6..15: note = DNA
atatccaaccgtcccagacc

SEQ ID NO: 487 - DNA, 20 bp, synthetic construct
  source 1..20: mol_type = other DNA
  modified_base 1: mod_base = OTHER; note = 2'-O-methylguanosine-3'-phosphorothioate
  modified_base 2: mod_base = OTHER; note = 2'-O-methyladenosine-3'-phosphorothioate
  modified_base 3: mod_base = OTHER; note = 2'-O-methyluridine-3'-phosphorothioate
  modified_base 4: mod_base = OTHER; note = 2'-O-methylguanosine-3'-phosphorothioate
  modified_base 5: mod_base = OTHER; note = 2'-O-methyluridine-3'-phosphorothioate
  modified_base 6: mod_base = OTHER; note = 2'-deoxythymidine-3'-phosphorothioate
  modified_base 7: mod_base = OTHER; note = 2'-deoxythymidine-3'-phosphorothioate
  modified_base 8: mod_base = OTHER; note = 2'-deoxyadenosine-3'-phosphorothioate
  modified_base 9: mod_base = OTHER; note = 2'-deoxyadenosine-3'-phosphorothioate
  modified_base 10: mod_base = OTHER; note = 2'-deoxyguanosine-3'-phosphorothioate
  modified_base 11: mod_base = OTHER; note = 2'-deoxythymidine-3'-phosphorothioate
  modified_base 12: mod_base = OTHER; note = 2'-deoxyadenosine-3'-phosphorothioate
  modified_base 13: mod_base = OTHER; note = 2'-deoxythymidine-3'-phosphorothioate
  modified_base 14: mod_base = OTHER; note = 2'-deoxyadenosine-3'-phosphorothioate
  modified_base 15: mod_base = OTHER; note = 2'-deoxythymidine-3'-phosphorothioate
  modified_base 16: mod_base = OTHER; note = 2'-O-methylcytidine-3'-phosphorothioate
  modified_base 17: mod_base = OTHER; note = 2'-O-methylcytidine-3'-phosphorothioate
  modified_base 18: mod_base = OTHER; note = 2'-O-methyladenosine-3'-phosphorothioate
  modified_base 19: mod_base = OTHER; note = 2'-O-methyladenosine-3'-phosphorothioate
  modified_base 20: mod_base = OTHER; note = 2'-O-methylcytidine
  misc_feature 1..5: note = RNA
  misc_feature 16..20: note = RNA
  misc_feature 6..15: note = DNA
gatgtttaagtatatccaac

SEQ ID NO: 488 - DNA, 20 bp, synthetic construct
  source 1..20: mol_type = other DNA
  modified_base 1: mod_base = OTHER; note = 2'-O-methyluridine-3'-phosphorothioate
  modified_base 2: mod_base = OTHER; note = 2'-O-methylguanosine-3'-phosphorothioate
  modified_base 3: mod_base = OTHER; note = 2'-O-methyladenosine-3'-phosphorothioate
  modified_base 4: mod_base = OTHER; note = 2'-O-methyluridine-3'-phosphorothioate
  modified_base 5: mod_base = OTHER; note = 2'-O-methyluridine-3'-phosphorothioate
  modified_base 6: mod_base = OTHER; note = 2'-deoxyadenosine-3'-phosphorothioate
  modified_base 7: mod_base = OTHER; note = 2'-deoxythymidine-3'-phosphorothioate
  modified_base 8: mod_base = OTHER; note = 2'-deoxythymidine-3'-phosphorothioate
  modified_base 9: mod_base = OTHER; note = 2'-deoxyadenosine-3'-phosphorothioate
  modified_base 10: mod_base = OTHER; note = 2'-deoxyadenosine-3'-phosphorothioate
  modified_base 11: mod_base = OTHER; note = 2'-deoxyguanosine-3'-phosphorothioate
  modified_base 12: mod_base = OTHER; note = 2'-deoxyadenosine-3'-phosphorothioate
  modified_base 13: mod_base = OTHER; note = 2'-deoxythymidine-3'-phosphorothioate
  modified_base 14: mod_base = OTHER; note = 2'-deoxyguanosine-3'-phosphorothioate
  modified_base 15: mod_base = OTHER; note = 2'-deoxythymidine-3'-phosphorothioate
  modified_base 16: mod_base = OTHER; note = 2'-O-methyluridine-3'-phosphorothioate
  modified_base 17: mod_base = OTHER; note = 2'-O-methyluridine-3'-phosphorothioate
  modified_base 18: mod_base = OTHER; note = 2'-O-methyladenosine-3'-phosphorothioate
  modified_base 19: mod_base = OTHER; note = 2'-O-methyladenosine-3'-phosphorothioate
  modified_base 20: mod_base = OTHER; note = 2'-O-methylguanosine
  misc_feature 1..5: note = RNA
  misc_feature 16..20: note = RNA
  misc_feature 6..15: note = DNA
tgattattaagatgtttaag

SEQ ID NO: 489 - DNA, 20 bp, synthetic construct
  source 1..20: mol_type = other DNA
  modified_base 1: mod_base = OTHER; note = 2'-O-methyladenosine-3'-phosphorothioate
  modified_base 2: mod_base = OTHER; note = 2'-O-methyladenosine-3'-phosphorothioate
  modified_base 3: mod_base = OTHER; note = 2'-O-methyladenosine-3'-phosphorothioate
  modified_base 4: mod_base = OTHER; note = 2'-O-methyladenosine-3'-phosphorothioate
  modified_base 5: mod_base = OTHER; note = 2'-O-methyluridine-3'-phosphorothioate
  modified_base 6: mod_base = OTHER; note = 2'-deoxythymidine-3'-phosphorothioate
  modified_base 7: mod_base = OTHER; note = 2'-deoxyadenosine-3'-phosphorothioate
  modified_base 8: mod_base = OTHER; note = 5'-methyl-deoxycytidine-3'-phosphorothioate
  modified_base 9: mod_base = OTHER; note = 2'-deoxythymidine-3'-phosphorothioate
  modified_base 10: mod_base = OTHER; note = 5'-methyl-deoxycytidine-3'-phosphorothioate
  modified_base 11: mod_base = OTHER; note = 2'-deoxythymidine-3'-phosphorothioate
  modified_base 12: mod_base = OTHER; note = 2'-deoxyguanosine-3'-phosphorothioate
  modified_base 13: mod_base = OTHER; note = 2'-deoxyadenosine-3'-phosphorothioate
  modified_base 14: mod_base = OTHER; note = 2'-deoxythymidine-3'-phosphorothioate
  modified_base 15: mod_base = OTHER; note = 2'-deoxythymidine-3'-phosphorothioate
  modified_base 16: mod_base = OTHER; note = 2'-O-methyladenosine-3'-phosphorothioate
  modified_base 17: mod_base = OTHER; note = 2'-O-methyluridine-3'-phosphorothioate
  modified_base 18: mod_base = OTHER; note = 2'-O-methyluridine-3'-phosphorothioate
  modified_base 19: mod_base = OTHER; note = 2'-O-methyladenosine-3'-phosphorothioate
  modified_base 20: mod_base = OTHER; note = 2'-O-methyladenosine
  misc_feature 1..5: note = RNA
  misc_feature 16..20: note = RNA
  misc_feature 6..15: note = DNA
aaaattactctgattattaa

SEQ ID NO: 490 - DNA, 20 bp, synthetic construct
  source 1..20: mol_type = other DNA
  modified_base 1: mod_base = OTHER; note = 2'-O-methylcytidine-3'-phosphorothioate
  modified_base 2: mod_base = OTHER; note = 2'-O-methyluridine-3'-phosphorothioate
  modified_base 3: mod_base = OTHER; note = 2'-O-methyluridine-3'-phosphorothioate
  modified_base 4: mod_base = OTHER; note = 2'-O-methyluridine-3'-phosphorothioate
  modified_base 5: mod_base = OTHER; note = 2'-O-methylguanosine-3'-phosphorothioate
  modified_base 6: mod_base = OTHER; note = 2'-deoxythymidine-3'-phosphorothioate
  modified_base 7: mod_base = OTHER; note = 2'-deoxyadenosine-3'-phosphorothioate
  modified_base 8: mod_base = OTHER; note = 2'-deoxyadenosine-3'-phosphorothioate
  modified_base 9: mod_base = OTHER; note = 2'-deoxyadenosine-3'-phosphorothioate
  modified_base 10: mod_base = OTHER; note = 2'-deoxythymidine-3'-phosphorothioate
  modified_base 11: mod_base = OTHER; note = 2'-deoxyguanosine-3'-phosphorothioate
  modified_base 12: mod_base = OTHER; note = 2'-deoxyadenosine-3'-phosphorothioate
  modified_base 13: mod_base = OTHER; note = 2'-deoxyadenosine-3'-phosphorothioate
  modified_base 14: mod_base = OTHER; note = 2'-deoxyadenosine-3'-phosphorothioate
  modified_base 15: mod_base = OTHER; note = 2'-deoxyadenosine-3'-phosphorothioate
  modified_base 16: mod_base = OTHER; note = 2'-O-methyluridine-3'-phosphorothioate
  modified_base 17: mod_base = OTHER; note = 2'-O-methyluridine-3'-phosphorothioate
  modified_base 18: mod_base = OTHER; note = 2'-O-methyladenosine-3'-phosphorothioate
  modified_base 19: mod_base = OTHER; note = 2'-O-methylcytidine-3'-phosphorothioate
  modified_base 20: mod_base = OTHER; note = 2'-O-methyluridine
  misc_feature 1..5: note = RNA
  misc_feature 16..20: note = RNA
  misc_feature 6..15: note = DNA
ctttgtaaatgaaaattact

SEQ ID NO: 491 - DNA, 20 bp, synthetic construct
  source 1..20: mol_type = other DNA
  modified_base 1: mod_base = OTHER; note = 2'-O-methyladenosine-3'-phosphorothioate
  modified_base 2: mod_base = OTHER; note = 2'-O-methylguanosine-3'-phosphorothioate
  modified_base 3: mod_base = OTHER; note = 2'-O-methyluridine-3'-phosphorothioate
  modified_base 4: mod_base = OTHER; note = 2'-O-methyladenosine-3'-phosphorothioate
  modified_base 5: mod_base = OTHER; note = 2'-O-methylcytidine-3'-phosphorothioate
  modified_base 6: mod_base = OTHER; note = 5'-methyl-deoxycytidine-3'-phosphorothioate
  modified_base 7: mod_base = OTHER; note = 2'-deoxyguanosine-3'-phosphorothioate
  modified_base 8: mod_base = OTHER; note = 2'-deoxyadenosine-3'-phosphorothioate
  modified_base 9: mod_base = OTHER; note = 5'-methyl-deoxycytidine-3'-phosphorothioate
  modified_base 10: mod_base = OTHER; note = 5'-methyl-deoxycytidine-3'-phosphorothioate
  modified_base 11: mod_base = OTHER; note = 2'-deoxythymidine-3'-phosphorothioate
  modified_base 12: mod_base = OTHER; note = 5'-methyl-deoxycytidine-3'-phosphorothioate
  modified_base 13: mod_base = OTHER; note = 2'-deoxythymidine-3'-phosphorothioate
  modified_base 14: mod_base = OTHER; note = 5'-methyl-deoxycytidine-3'-phosphorothioate
  modified_base 15: mod_base = OTHER; note = 2'-deoxythymidine-3'-phosphorothioate
  modified_base 16: mod_base = OTHER; note = 2'-O-methyluridine-3'-phosphorothioate
  modified_base 17: mod_base = OTHER; note = 2'-O-methyluridine-3'-phosphorothioate
  modified_base 18: mod_base = OTHER; note = 2'-O-methylguanosine-3'-phosphorothioate
  modified_base 19: mod_base = OTHER; note = 2'-O-methyluridine-3'-phosphorothioate
  modified_base 20: mod_base = OTHER; note = 2'-O-methyladenosine
  misc_feature 1..5: note = RNA
  misc_feature 16..20: note = RNA
  misc_feature 6..15: note = DNA
agtaccgacctctctttgta

SEQ ID NO: 492 - DNA, 20 bp, synthetic construct
  source 1..20: mol_type = other DNA
  modified_base 1: mod_base = OTHER; note = 2'-O-methylguanosine-3'-phosphorothioate
  modified_base 2: mod_base = OTHER; note = 2'-O-methylguanosine-3'-phosphorothioate
  modified_base 3: mod_base = OTHER; note = 2'-O-methylguanosine-3'-phosphorothioate
  modified_base 4: mod_base = OTHER; note = 2'-O-methyluridine-3'-phosphorothioate
  modified_base 5: mod_base = OTHER; note = 2'-O-methyluridine-3'-phosphorothioate
  modified_base 6: mod_base = OTHER; note = 2'-deoxyadenosine-3'-phosphorothioate
  modified_base 7: mod_base = OTHER; note = 2'-deoxythymidine-3'-phosphorothioate
  modified_base 8: mod_base = OTHER; note = 2'-deoxythymidine-3'-phosphorothioate
  modified_base 9: mod_base = OTHER; note = 2'-deoxythymidine-3'-phosphorothioate
  modified_base 10: mod_base = OTHER; note = 2'-deoxythymidine-3'-phosphorothioate
  modified_base 11: mod_base = OTHER; note = 2'-deoxyadenosine-3'-phosphorothioate
  modified_base 12: mod_base = OTHER; note = 2'-deoxyadenosine-3'-phosphorothioate
  modified_base 13: mod_base = OTHER; note = 2'-deoxyguanosine-3'-phosphorothioate
  modified_base 14: mod_base = OTHER; note = 2'-deoxythymidine-3'-phosphorothioate
  modified_base 15: mod_base = OTHER; note = 2'-deoxyadenosine-3'-phosphorothioate
  modified_base 16: mod_base = OTHER; note = 2'-O-methylcytidine-3'-phosphorothioate
  modified_base 17: mod_base = OTHER; note = 2'-O-methylcytidine-3'-phosphorothioate
  modified_base 18: mod_base = OTHER; note = 2'-O-methylguanosine-3'-phosphorothioate
  modified_base 19: mod_base = OTHER; note = 2'-O-methyladenosine-3'-phosphorothioate
  modified_base 20: mod_base = OTHER; note = 2'-O-methylcytidine
  misc_feature 1..5: note = RNA
  misc_feature 16..20: note = RNA
  misc_feature 6..15: note = DNA
gggttattttaagtaccgac

SEQ ID NO: 493 - DNA, 20 bp, synthetic construct
  source 1..20: mol_type = other DNA
  modified_base 1: mod_base = OTHER; note = 2'-O-methyluridine-3'-phosphorothioate
  modified_base 2: mod_base = OTHER; note = 2'-O-methyladenosine-3'-phosphorothioate
  modified_base 3: mod_base = OTHER; note = 2'-O-methyluridine-3'-phosphorothioate
  modified_base 4: mod_base = OTHER; note = 2'-O-methyluridine-3'-phosphorothioate
  modified_base 5: mod_base = OTHER; note = 2'-O-methyluridine-3'-phosphorothioate
  modified_base 6: mod_base = OTHER; note = 2'-deoxythymidine-3'-phosphorothioate
  modified_base 7: mod_base = OTHER; note = 2'-deoxythymidine-3'-phosphorothioate
  modified_base 8: mod_base = OTHER; note = 5'-methyl-deoxycytidine-3'-phosphorothioate
  modified_base 9: mod_base = OTHER; note = 2'-deoxyadenosine-3'-phosphorothioate
  modified_base 10: mod_base = OTHER; note = 2'-deoxyguanosine-3'-phosphorothioate
  modified_base 11: mod_base = OTHER; note = 2'-deoxyguanosine-3'-phosphorothioate
  modified_base 12: mod_base = OTHER; note = 2'-deoxyguanosine-3'-phosphorothioate
  modified_base 13: mod_base = OTHER; note = 2'-deoxythymidine-3'-phosphorothioate
  modified_base 14: mod_base = OTHER; note = 2'-deoxythymidine-3'-phosphorothioate
  modified_base 15: mod_base = OTHER; note = 2'-deoxyadenosine-3'-phosphorothioate
  modified_base 16: mod_base = OTHER; note = 2'-O-methyluridine-3'-phosphorothioate
  modified_base 17: mod_base = OTHER; note = 2'-O-methyluridine-3'-phosphorothioate
  modified_base 18: mod_base = OTHER; note = 2'-O-methyluridine-3'-phosphorothioate
  modified_base 19: mod_base = OTHER; note = 2'-O-methyluridine-3'-phosphorothioate
  modified_base 20: mod_base = OTHER; note = 2'-O-methyladenosine
  misc_feature 1..5: note = RNA
  misc_feature 16..20: note = RNA
  misc_feature 6..15: note = DNA
tatttttcagggttatttta

SEQ ID NO: 494 - DNA, 20 bp, synthetic construct
  source 1..20: mol_type = other DNA
  modified_base 1: mod_base = OTHER; note = 2'-O-methylguanosine-3'-phosphorothioate
  modified_base 2: mod_base = OTHER; note = 2'-O-methyladenosine-3'-phosphorothioate
  modified_base 3: mod_base = OTHER; note = 2'-O-methyladenosine-3'-phosphorothioate
  modified_base 4: mod_base = OTHER; note = 2'-O-methyluridine-3'-phosphorothioate
  modified_base 5: mod_base = OTHER; note = 2'-O-methyluridine-3'-phosphorothioate
  modified_base 6: mod_base = OTHER; note = 5'-methyl-deoxycytidine-3'-phosphorothioate
  modified_base 7: mod_base = OTHER; note = 5'-methyl-deoxycytidine-3'-phosphorothioate
  modified_base 8: mod_base = OTHER; note = 2'-deoxyadenosine-3'-phosphorothioate
  modified_base 9: mod_base = OTHER; note = 2'-deoxyguanosine-3'-phosphorothioate
  modified_base 10: mod_base = OTHER; note = 2'-deoxythymidine-3'-phosphorothioate
  modified_base 11: mod_base = OTHER; note = 2'-deoxyguanosine-3'-phosphorothioate
  modified_base 12: mod_base = OTHER; note = 2'-deoxythymidine-3'-phosphorothioate
  modified_base 13: mod_base = OTHER; note = 2'-deoxythymidine-3'-phosphorothioate
  modified_base 14: mod_base = OTHER; note = 2'-deoxyadenosine-3'-phosphorothioate
  modified_base 15: mod_base = OTHER; note = 2'-deoxythymidine-3'-phosphorothioate
  modified_base 16: mod_base = OTHER; note = 2'-O-methyluridine-3'-phosphorothioate
  modified_base 17: mod_base = OTHER; note = 2'-O-methyluridine-3'-phosphorothioate
  modified_base 18: mod_base = OTHER; note = 2'-O-methyluridine-3'-phosphorothioate
  modified_base 19: mod_base = OTHER; note = 2'-O-methyluridine-3'-phosphorothioate
  modified_base 20: mod_base = OTHER; note = 2'-O-methylcytidine
  misc_feature 1..5: note = RNA
  misc_feature 16..20: note = RNA
  misc_feature 6..15: note = DNA
gaattccagtgttatttttc

SEQ ID NO: 495 - DNA, 20 bp, synthetic construct
  source 1..20: mol_type = other DNA
  modified_base 1: mod_base = OTHER; note = 2'-O-methyluridine-3'-phosphorothioate
  modified_base 2: mod_base = OTHER; note = 2'-O-methylguanosine-3'-phosphorothioate
  modified_base 3: mod_base = OTHER; note = 2'-O-methylcytidine-3'-phosphorothioate
  modified_base 4: mod_base = OTHER; note = 2'-O-methyluridine-3'-phosphorothioate
  modified_base 5: mod_base = OTHER; note = 2'-O-methyladenosine-3'-phosphorothioate
  modified_base 6: mod_base = OTHER; note = 2'-deoxyguanosine-3'-phosphorothioate
  modified_base 7: mod_base = OTHER; note = 2'-deoxyadenosine-3'-phosphorothioate
  modified_base 8: mod_base = OTHER; note = 2'-deoxyadenosine-3'-phosphorothioate
  modified_base 9: mod_base = OTHER; note = 2'-deoxyadenosine-3'-phosphorothioate
  modified_base 10: mod_base = OTHER; note = 2'-deoxyadenosine-3'-phosphorothioate
  modified_base 11: mod_base = OTHER; note = 2'-deoxyguanosine-3'-phosphorothioate
  modified_base 12: mod_base = OTHER; note = 2'-deoxyguanosine-3'-phosphorothioate
  modified_base 13: mod_base = OTHER; note = 2'-deoxyadenosine-3'-phosphorothioate
  modified_base 14: mod_base = OTHER; note = 2'-deoxyadenosine-3'-phosphorothioate
  modified_base 15: mod_base = OTHER; note = 2'-deoxythymidine-3'-phosphorothioate
  modified_base 16: mod_base = OTHER; note = 2'-O-methyluridine-3'-phosphorothioate
  modified_base 17: mod_base = OTHER; note = 2'-O-methylcytidine-3'-phosphorothioate
  modified_base 18: mod_base = OTHER; note = 2'-O-methylcytidine-3'-phosphorothioate
  modified_base 19: mod_base = OTHER; note = 2'-O-methyladenosine-3'-phosphorothioate
  modified_base 20: mod_base = OTHER; note = 2'-O-methylguanosine
  misc_feature 1..5: note = RNA
  misc_feature 16..20: note = RNA
  misc_feature 6..15: note = DNA
tgctagaaaaggaattccag

SEQ ID NO: 496 - DNA, 20 bp, synthetic construct
  source 1..20: mol_type = other DNA
  modified_base 1: mod_base = OTHER; note = 2'-O-methyladenosine-3'-phosphorothioate
  modified_base 2: mod_base = OTHER; note = 2'-O-methyluridine-3'-phosphorothioate
  modified_base 3: mod_base = OTHER; note = 2'-O-methyladenosine-3'-phosphorothioate
  modified_base 4: mod_base = OTHER; note = 2'-O-methyladenosine-3'-phosphorothioate
  modified_base 5: mod_base = OTHER; note = 2'-O-methyladenosine-3'-phosphorothioate
  modified_base 6: mod_base = OTHER; note = 2'-deoxythymidine-3'-phosphorothioate
  modified_base 7: mod_base = OTHER; note = 2'-deoxyadenosine-3'-phosphorothioate
  modified_base 8: mod_base = OTHER; note = 2'-deoxythymidine-3'-phosphorothioate
  modified_base 9: mod_base = OTHER; note = 2'-deoxyadenosine-3'-phosphorothioate
  modified_base 10: mod_base = OTHER; note = 2'-deoxyadenosine-3'-phosphorothioate
  modified_base 11: mod_base = OTHER; note = 2'-deoxythymidine-3'-phosphorothioate
  modified_base 12: mod_base = OTHER; note = 2'-deoxyguanosine-3'-phosphorothioate
  modified_base 13: mod_base = OTHER; note = 5'-methyl-deoxycytidine-3'-phosphorothioate
  modified_base 14: mod_base = OTHER; note = 2'-deoxythymidine-3'-phosphorothioate
  modified_base 15: mod_base = OTHER; note = 2'-deoxyadenosine-3'-phosphorothioate
  modified_base 16: mod_base = OTHER; note = 2'-O-methylguanosine-3'-phosphorothioate
  modified_base 17: mod_base = OTHER; note = 2'-O-methyladenosine-3'-phosphorothioate
  modified_base 18: mod_base = OTHER; note = 2'-O-methyladenosine-3'-phosphorothioate
  modified_base 19: mod_base = OTHER; note = 2'-O-methyladenosine-3'-phosphorothioate
  modified_base 20: mod_base = OTHER; note = 2'-O-methyladenosine
  misc_feature 1..5: note = RNA
  misc_feature 16..20: note = RNA
  misc_feature 6..15: note = DNA
ataaatataatgctagaaaa

SEQ ID NO: 497 - DNA, 20 bp, synthetic construct
  source 1..20: mol_type = other DNA
  modified_base 1: mod_base = OTHER; note = 2'-O-methylguanosine-3'-phosphorothioate
  modified_base 2: mod_base = OTHER; note = 2'-O-methylguanosine-3'-phosphorothioate
  modified_base 3: mod_base = OTHER; note = 2'-O-methylcytidine-3'-phosphorothioate
  modified_base 4: mod_base = OTHER; note = 2'-O-methyladenosine-3'-phosphorothioate
  modified_base 5: mod_base = OTHER; note = 2'-O-methyladenosine-3'-phosphorothioate
  modified_base 6: mod_base = OTHER; note = 2'-deoxyadenosine-3'-phosphorothioate
  modified_base 7: mod_base = OTHER; note = 2'-deoxythymidine-3'-phosphorothioate
  modified_base 8: mod_base = OTHER; note = 5'-methyl-deoxycytidine-3'-phosphorothioate
  modified_base 9: mod_base = OTHER; note = 2'-deoxyadenosine-3'-phosphorothioate
  modified_base 10: mod_base = OTHER; note = 2'-deoxyguanosine-3'-phosphorothioate
  modified_base 11: mod_base = OTHER; note = 2'-deoxyguanosine-3'-phosphorothioate
  modified_base 12: mod_base = OTHER; note = 2'-deoxyadenosine-3'-phosphorothioate
  modified_base 13: mod_base = OTHER; note = 2'-deoxyadenosine-3'-phosphorothioate
  modified_base 14: mod_base = OTHER; note = 2'-deoxythymidine-3'-phosphorothioate
  modified_base 15: mod_base = OTHER; note = 2'-deoxyadenosine-3'-phosphorothioate
  modified_base 16: mod_base = OTHER; note = 2'-O-methyladenosine-3'-phosphorothioate
  modified_base 17: mod_base = OTHER; note = 2'-O-methyladenosine-3'-phosphorothioate
  modified_base 18: mod_base = OTHER; note = 2'-O-methyluridine-3'-phosphorothioate
  modified_base 19: mod_base = OTHER; note = 2'-O-methyladenosine-3'-phosphorothioate
  modified_base 20: mod_base = OTHER; note = 2'-O-methyluridine
  misc_feature 1..5: note = RNA
  misc_feature 16..20: note = RNA
  misc_feature 6..15: note = DNA
ggcaaatcaggaataaatat

SEQ ID NO: 498 - DNA, 20 bp, synthetic construct
  source 1..20: mol_type = other DNA
  modified_base 1: mod_base = OTHER; note = 2'-O-methyladenosine-3'-phosphorothioate
  modified_base 2: mod_base = OTHER; note = 2'-O-methyluridine-3'-phosphorothioate
  modified_base 3: mod_base = OTHER; note = 2'-O-methyladenosine-3'-phosphorothioate
  modified_base 4: mod_base = OTHER; note = 2'-O-methyluridine-3'-phosphorothioate
  modified_base 5: mod_base = OTHER; note = 2'-O-methylguanosine-3'-phosphorothioate
  modified_base 6: mod_base = OTHER; note = 2'-deoxyguanosine-3'-phosphorothioate
  modified_base 7: mod_base = OTHER; note = 5'-methyl-deoxycytidine-3'-phosphorothioate
  modified_base 8: mod_base = OTHER; note = 2'-deoxyadenosine-3'-phosphorothioate
  modified_base 9: mod_base = OTHER; note = 2'-deoxyadenosine-3'-phosphorothioate
  modified_base 10: mod_base = OTHER; note = 2'-deoxyadenosine-3'-phosphorothioate
  modified_base 11: mod_base = OTHER; note = 2'-deoxyguanosine-3'-phosphorothioate
  modified_base 12: mod_base = OTHER; note = 2'-deoxyguanosine-3'-phosphorothioate
  modified_base 13: mod_base = OTHER; note = 5'-methyl-deoxycytidine-3'-phosphorothioate
  modified_base 14: mod_base = OTHER; note = 2'-deoxyadenosine-3'-phosphorothioate
  modified_base 15: mod_base = OTHER; note = 2'-deoxyadenosine-3'-phosphorothioate
  modified_base 16: mod_base = OTHER; note = 2'-O-methyladenosine-3'-phosphorothioate
  modified_base 17: mod_base = OTHER; note = 2'-O-methyluridine-3'-phosphorothioate
  modified_base 18: mod_base = OTHER; note = 2'-O-methylcytidine-3'-phosphorothioate
  modified_base 19: mod_base = OTHER; note = 2'-O-methyladenosine-3'-phosphorothioate
  modified_base 20: mod_base = OTHER; note = 2'-O-methylguanosine
  misc_feature 1..5: note = RNA
  misc_feature 16..20: note = RNA
  misc_feature 6..15: note = DNA
atatggcaaaggcaaatcag

SEQ ID NO: 499 - DNA, 20 bp, synthetic construct
  source 1..20: mol_type = other DNA
  modified_base 1: mod_base = OTHER; note = 2'-O-methyladenosine-3'-phosphorothioate
  modified_base 2: mod_base = OTHER; note = 2'-O-methylguanosine-3'-phosphorothioate
  modified_base 3: mod_base = OTHER; note = 2'-O-methylcytidine-3'-phosphorothioate
  modified_base 4: mod_base = OTHER; note = 2'-O-methyladenosine-3'-phosphorothioate
  modified_base 5: mod_base = OTHER; note = 2'-O-methyluridine-3'-phosphorothioate
  modified_base 6: mod_base = OTHER; note = 2'-deoxythymidine-3'-phosphorothioate
  modified_base 7: mod_base = OTHER; note = 2'-deoxyadenosine-3'-phosphorothioate
  modified_base 8: mod_base = OTHER; note = 2'-deoxyguanosine-3'-phosphorothioate
  modified_base 9: mod_base = OTHER; note = 2'-deoxyadenosine-3'-phosphorothioate
  modified_base 10: mod_base = OTHER; note = 2'-deoxythymidine-3'-phosphorothioate
  modified_base 11: mod_base = OTHER; note = 2'-deoxythymidine-3'-phosphorothioate
  modified_base 12: mod_base = OTHER; note = 2'-deoxyadenosine-3'-phosphorothioate
  modified_base 13: mod_base = OTHER; note = 2'-deoxythymidine-3'-phosphorothioate
  modified_base 14: mod_base = OTHER; note = 2'-deoxyadenosine-3'-phosphorothioate
  modified_base 15: mod_base = OTHER; note = 2'-deoxythymidine-3'-phosphorothioate
  modified_base 16: mod_base = OTHER; note = 2'-O-methylguanosine-3'-phosphorothioate
  modified_base 17: mod_base = OTHER; note = 2'-O-methylguanosine-3'-phosphorothioate
  modified_base 18: mod_base = OTHER; note = 2'-O-methylcytidine-3'-phosphorothioate
  modified_base 19: mod_base = OTHER; note = 2'-O-methyladenosine-3'-phosphorothioate
  modified_base 20: mod_base = OTHER; note = 2'-O-methyladenosine
  misc_feature 1..5: note = RNA
  misc_feature 16..20: note = RNA
  misc_feature 6..15: note = DNA
agcattagattatatggcaa

SEQ ID NO: 500 - DNA, 20 bp, synthetic construct
  source 1..20: mol_type = other DNA
  modified_base 1: mod_base = OTHER; note = 2'-O-methyladenosine-3'-phosphorothioate
  modified_base 2: mod_base = OTHER; note = 2'-O-methylcytidine-3'-phosphorothioate
  modified_base 3: mod_base = OTHER; note = 2'-O-methyluridine-3'-phosphorothioate
  modified_base 4: mod_base = OTHER; note = 2'-O-methyladenosine-3'-phosphorothioate
  modified_base 5: mod_base = OTHER; note = 2'-O-methyluridine-3'-phosphorothioate
  modified_base 6: mod_base = OTHER; note = 2'-deoxyadenosine-3'-phosphorothioate
  modified_base 7: mod_base = OTHER; note = 2'-deoxythymidine-3'-phosphorothioate
  modified_base 8: mod_base = OTHER; note = 2'-deoxyadenosine-3'-phosphorothioate
  modified_base 9: mod_base = OTHER; note = 2'-deoxyadenosine-3'-phosphorothioate
  modified_base 10: mod_base = OTHER; note = 2'-deoxyadenosine-3'-phosphorothioate
  modified_base 11: mod_base = OTHER; note = 5'-methyl-deoxycytidine-3'-phosphorothioate
  modified_base 12: mod_base = OTHER; note = 2'-deoxyadenosine-3'-phosphorothioate
  modified_base 13: mod_base = OTHER; note = 2'-deoxyadenosine-3'-phosphorothioate
  modified_base 14: mod_base = OTHER; note = 2'-deoxyguanosine-3'-phosphorothioate
  modified_base 15: mod_base = OTHER; note = 5'-methyl-deoxycytidine-3'-phosphorothioate
  modified_base 16: mod_base = OTHER; note = 2'-O-methyladenosine-3'-phosphorothioate
  modified_base 17: mod_base = OTHER; note = 2'-O-methyluridine-3'-phosphorothioate
  modified_base 18: mod_base = OTHER; note = 2'-O-methyluridine-3'-phosphorothioate
  modified_base 19: mod_base = OTHER; note = 2'-O-methyladenosine-3'-phosphorothioate
  modified_base 20: mod_base = OTHER; note = 2'-O-methylguanosine
  misc_feature 1..5: note = RNA
  misc_feature 16..20: note = RNA
  misc_feature 6..15: note = DNA
actatataaacaagcattag

SEQ ID NO: 501 - DNA, 20 bp, synthetic construct
  source 1..20: mol_type = other DNA
  modified_base 1: mod_base = OTHER; note = 2'-O-methyladenosine-3'-phosphorothioate
  modified_base 2: mod_base = OTHER; note = 2'-O-methyladenosine-3'-phosphorothioate
  modified_base 3: mod_base = OTHER; note = 2'-O-methyluridine-3'-phosphorothioate
  modified_base 4: mod_base = OTHER; note = 2'-O-methyladenosine-3'-phosphorothioate
  modified_base 5: mod_base = OTHER; note = 2'-O-methylcytidine-3'-phosphorothioate
  modified_base 6: mod_base = OTHER; note = 5'-methyl-deoxycytidine-3'-phosphorothioate
  modified_base 7: mod_base = OTHER; note = 2'-deoxyadenosine-3'-phosphorothioate
  modified_base 8: mod_base = OTHER; note = 2'-deoxyguanosine-3'-phosphorothioate
  modified_base 9: mod_base = OTHER; note = 2'-deoxyadenosine-3'-phosphorothioate
  modified_base 10: mod_base = OTHER; note = 5'-methyl-deoxycytidine-3'-phosphorothioate
  modified_base 11: mod_base = OTHER; note = 2'-deoxyadenosine-3'-phosphorothioate
  modified_base 12: mod_base = OTHER; note = 5'-methyl-deoxycytidine-3'-phosphorothioate
  modified_base 13: mod_base = OTHER; note = 2'-deoxythymidine-3'-phosphorothioate
  modified_base 14: mod_base = OTHER; note = 2'-deoxyadenosine-3'-phosphorothioate
  modified_base 15: mod_base = OTHER; note = 2'-deoxythymidine-3'-phosphorothioate
  modified_base 16: mod_base = OTHER; note = 2'-O-methyladenosine-3'-phosphorothioate
  modified_base 17: mod_base = OTHER; note = 2'-O-methyluridine-3'-phosphorothioate
  modified_base 18: mod_base = OTHER; note = 2'-O-methyladenosine-3'-phosphorothioate
  modified_base 19: mod_base = OTHER; note = 2'-O-methyladenosine-3'-phosphorothioate
  modified_base 20: mod_base = OTHER; note = 2'-O-methyladenosine
  misc_feature 1..5: note = RNA
  misc_feature 16..20: note = RNA
  misc_feature 6..15: note = DNA
aataccagacactatataaa

SEQ ID NO: 502 - DNA, 20 bp, synthetic construct
  source 1..20: mol_type = other DNA
  modified_base 1: mod_base = OTHER; note = 2'-O-methyladenosine-3'-phosphorothioate
  modified_base 2: mod_base = OTHER; note = 2'-O-methylguanosine-3'-phosphorothioate
  modified_base 3: mod_base = OTHER; note = 2'-O-methyladenosine-3'-phosphorothioate
  modified_base 4: mod_base = OTHER; note = 2'-O-methyladenosine-3'-phosphorothioate
  modified_base 5: mod_base = OTHER; note = 2'-O-methylcytidine-3'-phosphorothioate
  modified_base 6: mod_base = OTHER; note = 2'-deoxythymidine-3'-phosphorothioate
  modified_base 7: mod_base = OTHER; note = 2'-deoxyguanosine-3'-phosphorothioate
  modified_base 8: mod_base = OTHER; note = 2'-deoxythymidine-3'-phosphorothioate
  modified_base 9: mod_base = OTHER; note = 2'-deoxythymidine-3'-phosphorothioate
  modified_base 10: mod_base = OTHER; note = 2'-deoxyadenosine-3'-phosphorothioate
  modified_base 11: mod_base = OTHER; note = 2'-deoxyadenosine-3'-phosphorothioate
  modified_base 12: mod_base = OTHER; note = 2'-deoxyadenosine-3'-phosphorothioate
  modified_base 13: mod_base = OTHER; note = 5'-methyl-deoxycytidine-3'-phosphorothioate
  modified_base 14: mod_base = OTHER; note = 2'-deoxyadenosine-3'-phosphorothioate
  modified_base 15: mod_base = OTHER; note = 2'-deoxyadenosine-3'-phosphorothioate
  modified_base 16: mod_base = OTHER; note = 2'-O-methyluridine-3'-phosphorothioate
  modified_base 17: mod_base = OTHER; note = 2'-O-methyladenosine-3'-phosphorothioate
  modified_base 18: mod_base = OTHER; note = 2'-O-methylcytidine-3'-phosphorothioate
  modified_base 19: mod_base = OTHER; note = 2'-O-methylcytidine-3'-phosphorothioate
  modified_base 20: mod_base = OTHER; note = 2'-O-methyladenosine
  misc_feature 1..5: note = RNA
  misc_feature 16..20: note = RNA
  misc_feature 6..15: note = DNA
agaactgttaaacaatacca

SEQ ID NO: 503 - DNA, 20 bp, synthetic construct
  source 1..20: mol_type = other DNA
  modified_base 1: mod_base = OTHER; note = 2'-O-methyladenosine-3'-phosphorothioate
  modified_base 2: mod_base = OTHER; note = 2'-O-methylguanosine-3'-phosphorothioate
  modified_base 3: mod_base = OTHER; note = 2'-O-methyladenosine-3'-phosphorothioate
  modified_base 4: mod_base = OTHER; note = 2'-O-methyladenosine-3'-phosphorothioate
  modified_base 5: mod_base = OTHER; note = 2'-O-methyladenosine-3'-phosphorothioate
  modified_base 6: mod_base = OTHER; note = 2'-deoxyadenosine-3'-phosphorothioate
  modified_base 7: mod_base = OTHER; note = 2'-deoxyguanosine-3'-phosphorothioate
  modified_base 8: mod_base = OTHER; note = 2'-deoxyadenosine-3'-phosphorothioate
  modified_base 9: mod_base = OTHER; note = 5'-methyl-deoxycytidine-3'-phosphorothioate
  modified_base 10: mod_base = OTHER; note = 2'-deoxyadenosine-3'-phosphorothioate
  modified_base 11: mod_base = OTHER; note = 2'-deoxyguanosine-3'-phosphorothioate
  modified_base 12: mod_base = OTHER; note = 2'-deoxyadenosine-3'-phosphorothioate
  modified_base 13: mod_base = OTHER; note = 2'-deoxyadenosine-3'-phosphorothioate
  modified_base 14: mod_base = OTHER; note = 5'-methyl-deoxycytidine-3'-phosphorothioate
  modified_base 15: mod_base = OTHER; note = 2'-deoxythymidine-3'-phosphorothioate
  modified_base 16: mod_base = OTHER; note = 2'-O-methylguanosine-3'-phosphorothioate
  modified_base 17: mod_base = OTHER; note = 2'-O-methyluridine-3'-phosphorothioate
  modified_base 18: mod_base = OTHER; note = 2'-O-methyluridine-3'-phosphorothioate
  modified_base 19: mod_base = OTHER; note = 2'-O-methyladenosine-3'-phosphorothioate
  modified_base 20: mod_base = OTHER; note = 2'-O-methyladenosine
  misc_feature 1..5: note = RNA
  misc_feature 16..20: note = RNA
  misc_feature 6..15: note = DNA
agaaaagacagaactgttaa

SEQ ID NO: 504 - DNA, 20 bp, synthetic construct
  source 1..20: mol_type = other DNA
  modified_base 1: mod_base = OTHER; note = 2'-O-methylguanosine-3'-phosphorothioate
  modified_base 2: mod_base = OTHER; note = 2'-O-methyluridine-3'-phosphorothioate
  modified_base 3: mod_base = OTHER; note = 2'-O-methylguanosine-3'-phosphorothioate
  modified_base 4: mod_base = OTHER; note = 2'-O-methylguanosine-3'-phosphorothioate
  modified_base 5: mod_base = OTHER; note = 2'-O-methylcytidine-3'-phosphorothioate
  modified_base 6: mod_base = OTHER; note = 2'-deoxyadenosine-3'-phosphorothioate
  modified_base 7: mod_base = OTHER; note = 2'-deoxythymidine-3'-phosphorothioate
  modified_base 8: mod_base = OTHER; note = 2'-deoxythymidine-3'-phosphorothioate
  modified_base 9: mod_base = OTHER; note = 2'-deoxythymidine-3'-phosphorothioate
  modified_base 10: mod_base = OTHER; note = 2'-deoxyadenosine-3'-phosphorothioate
  modified_base 11: mod_base = OTHER; note = 2'-deoxyadenosine-3'-phosphorothioate
  modified_base 12: mod_base = OTHER; note = 2'-deoxyadenosine-3'-phosphorothioate
  modified_base 13: mod_base = OTHER; note = 2'-deoxythymidine-3'-phosphorothioate
  modified_base 14: mod_base = OTHER; note = 2'-deoxyadenosine-3'-phosphorothioate
  modified_base 15: mod_base = OTHER; note = 2'-deoxyguanosine-3'-phosphorothioate
  modified_base 16: mod_base = OTHER; note = 2'-O-methyladenosine-3'-phosphorothioate
  modified_base 17: mod_base = OTHER; note = 2'-O-methyladenosine-3'-phosphorothioate
  modified_base 18: mod_base = OTHER; note = 2'-O-methyladenosine-3'-phosphorothioate
  modified_base 19: mod_base = OTHER; note = 2'-O-methyladenosine-3'-phosphorothioate
  modified_base 20: mod_base = OTHER; note = 2'-O-methylguanosine
  misc_feature 1..5: note = RNA
  misc_feature 16..20: note = RNA
  misc_feature 6..15: note = DNA
gtggcatttaaatagaaaag

SEQ ID NO: 505 - DNA, 20 bp, synthetic construct
  source 1..20: mol_type = other DNA
  modified_base 1: mod_base = OTHER; note = 2'-O-methyluridine-3'-phosphorothioate
  modified_base 2: mod_base = OTHER; note = 2'-O-methyladenosine-3'-phosphorothioate
  modified_base 3: mod_base = OTHER; note = 2'-O-methyladenosine-3'-phosphorothioate
  modified_base 4: mod_base = OTHER; note = 2'-O-methyladenosine-3'-phosphorothioate
  modified_base 5: mod_base = OTHER; note = 2'-O-methyladenosine-3'-phosphorothioate
  modified_base 6: mod_base = OTHER; note = 2'-deoxythymidine-3'-phosphorothioate
  modified_base 7: mod_base = OTHER; note = 2'-deoxythymidine-3'-phosphorothioate
  modified_base 8: mod_base = OTHER; note = 2'-deoxythymidine-3'-phosphorothioate
  modified_base 9: mod_base = OTHER; note = 2'-deoxyadenosine-3'-phosphorothioate
  modified_base 10: mod_base = OTHER; note = 2'-deoxyguanosine-3'-phosphorothioate
  modified_base 11: mod_base = OTHER; note = 2'-deoxythymidine-3'-phosphorothioate
  modified_base 12: mod_base = OTHER; note = 2'-deoxyguanosine-3'-phosphorothioate
  modified_base 13: mod_base = OTHER; note = 2'-deoxyguanosine-3'-phosphorothioate
  modified_base 14: mod_base = OTHER; note = 5'-methyl-deoxycytidine-3'-phosphorothioate
  modified_base 15: mod_base = OTHER; note = 2'-deoxyadenosine-3'-phosphorothioate
  modified_base 16: mod_base = OTHER; note = 2'-O-methyluridine-3'-phosphorothioate
  modified_base 17: mod_base = OTHER; note = 2'-O-methyluridine-3'-phosphorothioate
  modified_base 18: mod_base = OTHER; note = 2'-O-methyluridine-3'-phosphorothioate
  modified_base 19: mod_base = OTHER; note = 2'-O-methyladenosine-3'-phosphorothioate
  modified_base 20: mod_base = OTHER; note = 2'-O-methyladenosine
  misc_feature 1..5: note = RNA
  misc_feature 16..20: note = RNA
  misc_feature 6..15: note = DNA
taaaatttagtggcatttaa

SEQ ID NO: 506 - DNA, 20 bp, synthetic construct
  source 1..20: mol_type = other DNA
  modified_base 1: mod_base = OTHER; note = 2'-O-methyladenosine-3'-phosphorothioate
  modified_base 2: mod_base = OTHER; note = 2'-O-methylguanosine-3'-phosphorothioate
  modified_base 3: mod_base = OTHER; note = 2'-O-methylguanosine-3'-phosphorothioate
  modified_base 4: mod_base = OTHER; note = 2'-O-methyluridine-3'-phosphorothioate
  modified_base 5: mod_base = OTHER; note = 2'-O-methyladenosine-3'-phosphorothioate
  modified_base 6: mod_base = OTHER; note = 2'-deoxythymidine-3'-phosphorothioate
  modified_base 7: mod_base = OTHER; note = 2'-deoxyguanosine-3'-phosphorothioate
  modified_base 8: mod_base = OTHER; note = 2'-deoxyadenosine-3'-phosphorothioate
  modified_base 9: mod_base = OTHER; note = 2'-deoxyadenosine-3'-phosphorothioate
  modified_base 10: mod_base = OTHER; note = 2'-deoxythymidine-3'-phosphorothioate
  modified_base 11: mod_base = OTHER; note = 2'-deoxythymidine-3'-phosphorothioate
  modified_base 12: mod_base = OTHER; note = 2'-deoxythymidine-3'-phosphorothioate
  modified_base 13: mod_base = OTHER; note = 2'-deoxyadenosine-3'-phosphorothioate
  modified_base 14: mod_base = OTHER; note = 2'-deoxyadenosine-3'-phosphorothioate
  modified_base 15: mod_base = OTHER; note = 2'-deoxyadenosine-3'-phosphorothioate
  modified_base 16: mod_base = OTHER; note = 2'-O-methyladenosine-3'-phosphorothioate
  modified_base 17: mod_base = OTHER; note = 2'-O-methyluridine-3'-phosphorothioate
  modified_base 18: mod_base = OTHER; note = 2'-O-methyluridine-3'-phosphorothioate
  modified_base 19: mod_base = OTHER; note = 2'-O-methyluridine-3'-phosphorothioate
  modified_base 20: mod_base = OTHER; note = 2'-O-methyladenosine
  misc_feature 1..5: note = RNA
  misc_feature 16..20: note = RNA
  misc_feature 6..15: note = DNA
aggtatgaatttaaaattta

SEQ ID NO: 507 - DNA, 20 bp, synthetic construct
  source 1..20: mol_type = other DNA
  modified_base 1: mod_base = OTHER; note = 2'-O-methyluridine-3'-phosphorothioate
  modified_base 2: mod_base = OTHER; note = 2'-O-methylguanosine-3'-phosphorothioate
  modified_base 3: mod_base = OTHER; note = 2'-O-methyladenosine-3'-phosphorothioate
  modified_base 4: mod_base = OTHER; note = 2'-O-methyladenosine-3'-phosphorothioate
  modified_base 5: mod_base = OTHER; note = 2'-O-methyluridine-3'-phosphorothioate
  modified_base 6: mod_base = OTHER; note = 5'-methyl-deoxycytidine-3'-phosphorothioate
  modified_base 7: mod_base = OTHER; note = 2'-deoxyadenosine-3'-phosphorothioate
  modified_base 8: mod_base = OTHER; note = 2'-deoxythymidine-3'-phosphorothioate
  modified_base 9: mod_base = OTHER; note = 2'-deoxyguanosine-3'-phosphorothioate
  modified_base 10: mod_base = OTHER; note = 2'-deoxyguanosine-3'-phosphorothioate
  modified_base 11: mod_base = OTHER; note = 2'-deoxyadenosine-3'-phosphorothioate
  modified_base 12: mod_base = OTHER; note = 2'-deoxyadenosine-3'-phosphorothioate
  modified_base 13: mod_base = OTHER; note = 2'-deoxyadenosine-3'-phosphorothioate
  modified_base 14: mod_base = OTHER; note = 2'-deoxyguanosine-3'-phosphorothioate
  modified_base 15: mod_base = OTHER; note = 2'-deoxyguanosine-3'-phosphorothioate
  modified_base 16: mod_base = OTHER; note = 2'-O-methyluridine-3'-phosphorothioate
  modified_base 17: mod_base = OTHER; note = 2'-O-methyladenosine-3'-phosphorothioate
  modified_base 18: mod_base = OTHER; note = 2'-O-methyluridine-3'-phosphorothioate
  modified_base 19: mod_base = OTHER; note = 2'-O-methylguanosine-3'-phosphorothioate
  modified_base 20: mod_base = OTHER; note = 2'-O-methyladenosine
  misc_feature 1..5: note = RNA
  misc_feature 16..20: note = RNA
  misc_feature 6..15: note = DNA
tgaatcatggaaaggtatga

SEQ ID NO: 508 - DNA, 20 bp, synthetic construct
  source 1..20: mol_type = other DNA
  modified_base 1: mod_base = OTHER; note = 2'-O-methyluridine-3'-phosphorothioate
  modified_base 2: mod_base = OTHER; note = 2'-O-methyluridine-3'-phosphorothioate
  modified_base 3: mod_base = OTHER; note = 2'-O-methyluridine-3'-phosphorothioate
  modified_base 4: mod_base = OTHER; note = 2'-O-methyluridine-3'-phosphorothioate
  modified_base 5: mod_base = OTHER; note = 2'-O-methylguanosine-3'-phosphorothioate
  modified_base 6: mod_base = OTHER; note = 2'-deoxyadenosine-3'-phosphorothioate
  modified_base 7: mod_base = OTHER; note = 2'-deoxyadenosine-3'-phosphorothioate
  modified_base 8: mod_base = OTHER; note = 2'-deoxythymidine-3'-phosphorothioate
  modified_base 9: mod_base = OTHER; note = 2'-deoxythymidine-3'-phosphorothioate
  modified_base 10: mod_base = OTHER; note = 2'-deoxythymidine-3'-phosphorothioate
  modified_base 11: mod_base = OTHER; note = 2'-deoxythymidine-3'-phosphorothioate
  modified_base 12: mod_base = OTHER; note = 2'-deoxyguanosine-3'-phosphorothioate
  modified_base 13: mod_base = OTHER; note = 2'-deoxyadenosine-3'-phosphorothioate
  modified_base 14: mod_base = OTHER; note = 2'-deoxyadenosine-3'-phosphorothioate
  modified_base 15: mod_base = OTHER; note = 2'-deoxythymidine-3'-phosphorothioate
  modified_base 16: mod_base = OTHER; note = 2'-O-methylcytidine-3'-phosphorothioate
  modified_base 17: mod_base = OTHER; note = 2'-O-methyladenosine-3'-phosphorothioate
  modified_base 18: mod_base = OTHER; note = 2'-O-methyluridine-3'-phosphorothioate
  modified_base 19: mod_base = OTHER; note = 2'-O-methylguanosine-3'-phosphorothioate
  modified_base 20: mod_base = OTHER; note = 2'-O-methylguanosine
  misc_feature 1..5: note = RNA
  misc_feature 16..20: note = RNA
  misc_feature 6..15: note = DNA
ttttgaattttgaatcatgg

SEQ ID NO: 509 - DNA, 20 bp, synthetic construct
  source 1..20: mol_type = other DNA
  modified_base 1: mod_base = OTHER; note = 2'-O-methyluridine-3'-phosphorothioate
  modified_base 2: mod_base = OTHER; note = 2'-O-methylcytidine-3'-phosphorothioate
  modified_base 3: mod_base = OTHER; note = 2'-O-methylcytidine-3'-phosphorothioate
  modified_base 4: mod_base = OTHER; note = 2'-O-methylcytidine-3'-phosphorothioate
  modified_base 5: mod_base = OTHER; note = 2'-O-methyladenosine-3'-phosphorothioate
  modified_base 6: mod_base = OTHER; note = 2'-deoxythymidine-3'-phosphorothioate
  modified_base 7: mod_base = OTHER; note = 2'-deoxyguanosine-3'-phosphorothioate
  modified_base 8: mod_base = OTHER; note = 2'-deoxyguanosine-3'-phosphorothioate
  modified_base 9: mod_base = OTHER; note = 2'-deoxyguanosine-3'-phosphorothioate
  modified_base 10: mod_base = OTHER; note = 2'-deoxyadenosine-3'-phosphorothioate
  modified_base 11: mod_base = OTHER; note = 2'-deoxythymidine-3'-phosphorothioate
  modified_base 12: mod_base = OTHER; note = 5'-methyl-deoxycytidine-3'-phosphorothioate
  modified_base 13: mod_base = OTHER; note = 2'-deoxythymidine-3'-phosphorothioate
  modified_base 14: mod_base = OTHER; note = 2'-deoxythymidine-3'-phosphorothioate
  modified_base 15: mod_base = OTHER; note = 2'-deoxythymidine-3'-phosphorothioate
  modified_base 16: mod_base = OTHER; note = 2'-O-methyluridine-3'-phosphorothioate
  modified_base 17: mod_base = OTHER; note = 2'-O-methylguanosine-3'-phosphorothioate
  modified_base 18: mod_base = OTHER; note = 2'-O-methyladenosine-3'-phosphorothioate
  modified_base 19: mod_base = OTHER; note = 2'-O-methyladenosine-3'-phosphorothioate
  modified_base 20: mod_base = OTHER; note = 2'-O-methyluridine
  misc_feature 1..5: note = RNA
  misc_feature 16..20: note = RNA
  misc_feature 6..15: note = DNA
tcccatgggatcttttgaat

SEQ ID NO: 510 - DNA, 20 bp, synthetic construct
  source 1..20: mol_type = other DNA
  modified_base 1: mod_base = OTHER; note = 2'-O-methyluridine-3'-phosphorothioate
  modified_base 2: mod_base = OTHER; note = 2'-O-methyluridine-3'-phosphorothioate
  modified_base 3: mod_base = OTHER; note = 2'-O-methylcytidine-3'-phosphorothioate
  modified_base 4: mod_base = OTHER; note = 2'-O-methylcytidine-3'-phosphorothioate
  modified_base 5: mod_base = OTHER; note = 2'-O-methyladenosine-3'-phosphorothioate
  modified_base 6: mod_base = OTHER; note = 2'-deoxyadenosine-3'-phosphorothioate
  modified_base 7: mod_base = OTHER; note = 5'-methyl-deoxycytidine-3'-phosphorothioate
  modified_base 8: mod_base = OTHER; note = 5'-methyl-deoxycytidine-3'-phosphorothioate
  modified_base 9: mod_base = OTHER; note = 2'-deoxyadenosine-3'-phosphorothioate
  modified_base 10: mod_base = OTHER; note = 2'-deoxythymidine-3'-phosphorothioate
  modified_base 11: mod_base = OTHER; note = 5'-methyl-deoxycytidine-3'-phosphorothioate
  modified_base 12: mod_base = OTHER; note = 2'-deoxythymidine-3'-phosphorothioate
  modified_base 13: mod_base = OTHER; note = 5'-methyl-deoxycytidine-3'-phosphorothioate
  modified_base 14: mod_base = OTHER; note = 5'-methyl-deoxycytidine-3'-phosphorothioate
  modified_base 15: mod_base = OTHER; note = 5'-methyl-deoxycytidine-3'-phosphorothioate
  modified_base 16: mod_base = OTHER; note = 2'-O-methyladenosine-3'-phosphorothioate
  modified_base 17: mod_base = OTHER; note = 2'-O-methyluridine-3'-phosphorothioate
  modified_base 18: mod_base = OTHER; note = 2'-O-methylguanosine-3'-phosphorothioate
  modified_base 19: mod_base = OTHER; note = 2'-O-methylguanosine-3'-phosphorothioate
  modified_base 20: mod_base = OTHER; note = 2'-O-methylguanosine
  misc_feature 1..5: note = RNA
  misc_feature 16..20: note = RNA
  misc_feature 6..15: note = DNA
ttccaaccatctcccatggg

SEQ ID NO: 511 - DNA, 20 bp, synthetic construct
  source 1..20: mol_type = other DNA
  modified_base 1: mod_base = OTHER; note = 2'-O-methyladenosine-3'-phosphorothioate
  modified_base 2: mod_base = OTHER; note = 2'-O-methylguanosine-3'-phosphorothioate
  modified_base 3: mod_base = OTHER; note = 2'-O-methyluridine-3'-phosphorothioate
  modified_base 4: mod_base = OTHER; note = 2'-O-methylguanosine-3'-phosphorothioate
  modified_base 5: mod_base = OTHER; note = 2'-O-methylguanosine-3'-phosphorothioate
  modified_base 6: mod_base = OTHER; note = 2'-deoxyadenosine-3'-phosphorothioate
  modified_base 7: mod_base = OTHER; note = 2'-deoxyguanosine-3'-phosphorothioate
  modified_base 8: mod_base = OTHER; note = 2'-deoxyadenosine-3'-phosphorothioate
  modified_base 9: mod_base = OTHER; note = 2'-deoxythymidine-3'-phosphorothioate
  modified_base 10: mod_base = OTHER; note = 2'-deoxythymidine-3'-phosphorothioate
  modified_base 11: mod_base = OTHER; note = 2'-deoxythymidine-3'-phosphorothioate
  modified_base 12: mod_base = OTHER; note = 2'-deoxythymidine-3'-phosphorothioate
  modified_base 13: mod_base = OTHER; note = 5'-methyl-deoxycytidine-3'-phosphorothioate
  modified_base 14: mod_base = OTHER; note = 5'-methyl-deoxycytidine-3'-phosphorothioate
  modified_base 15: mod_base = OTHER; note = 2'-deoxyadenosine-3'-phosphorothioate
  modified_base 16: mod_base = OTHER; note = 2'-O-methyladenosine-3'-phosphorothioate
  modified_base 17: mod_base = OTHER; note = 2'-O-methylcytidine-3'-phosphorothioate
  modified_base 18: mod_base = OTHER; note = 2'-O-methylcytidine-3'-phosphorothioate
  modified_base 19: mod_base = OTHER; note = 2'-O-methyladenosine-3'-phosphorothioate
  modified_base 20: mod_base = OTHER; note = 2'-O-methyluridine
  misc_feature 1..5: note = RNA
  misc_feature 16..20: note = RNA
  misc_feature 6..15: note = DNA
agtggagattttccaaccat

SEQ ID NO: 512 - DNA, 20 bp, synthetic construct
  source 1..20: mol_type = other DNA
  modified_base 1: mod_base = OTHER; note = 2'-O-methyluridine-3'-phosphorothioate
  modified_base 2: mod_base = OTHER; note = 2'-O-methyluridine-3'-phosphorothioate
  modified_base 3: mod_base = OTHER; note = 2'-O-methylguanosine-3'-phosphorothioate
  modified_base 4: mod_base = OTHER; note = 2'-O-methylguanosine-3'-phosphorothioate
  modified_base 5: mod_base = OTHER; note = 2'-O-methyladenosine-3'-phosphorothioate
  modified_base 6: mod_base = OTHER; note = 2'-deoxyguanosine-3'-phosphorothioate
  modified_base 7: mod_base = OTHER; note = 2'-deoxyguanosine-3'-phosphorothioate
  modified_base 8: mod_base = OTHER; note = 2'-deoxyadenosine-3'-phosphorothioate
  modified_base 9: mod_base = OTHER; note = 2'-deoxythymidine-3'-phosphorothioate
  modified_base 10: mod_base = OTHER; note = 2'-deoxyguanosine-3'-phosphorothioate
  modified_base 11: mod_base = OTHER; note = 2'-deoxyadenosine-3'-phosphorothioate
  modified_base 12: mod_base = OTHER; note = 2'-deoxyadenosine-3'-phosphorothioate
  modified_base 13: mod_base = OTHER; note = 2'-deoxyguanosine-3'-phosphorothioate
  modified_base 14: mod_base = OTHER; note = 2'-deoxythymidine-3'-phosphorothioate
  modified_base 15: mod_base = OTHER; note = 2'-deoxyguanosine-3'-phosphorothioate
  modified_base 16: mod_base = OTHER; note = 2'-O-methylguanosine-3'-phosphorothioate
  modified_base 17: mod_base = OTHER; note = 2'-O-methyladenosine-3'-phosphorothioate
  modified_base 18: mod_base = OTHER; note = 2'-O-methylguanosine-3'-phosphorothioate
  modified_base 19: mod_base = OTHER; note = 2'-O-methyladenosine-3'-phosphorothioate
  modified_base 20: mod_base = OTHER; note = 2'-O-methyluridine
  misc_feature 1..5: note = RNA
  misc_feature 16..20: note = RNA
  misc_feature 6..15: note = DNA
ttggaggatgaagtggagat

SEQ ID NO: 513 - DNA, 20 bp, synthetic construct
  source 1..20: mol_type = other DNA
  modified_base 1: mod_base = OTHER; note = 2'-O-methyladenosine-3'-phosphorothioate
  modified_base 2: mod_base = OTHER; note = 2'-O-methylcytidine-3'-phosphorothioate
  modified_base 3: mod_base = OTHER; note = 2'-O-methyluridine-3'-phosphorothioate
  modified_base 4: mod_base = OTHER; note = 2'-O-methyluridine-3'-phosphorothioate
  modified_base 5: mod_base = OTHER; note = 2'-O-methylguanosine-3'-phosphorothioate
  modified_base 6: mod_base = OTHER; note = 2'-deoxyadenosine-3'-phosphorothioate
  modified_base 7: mod_base = OTHER; note = 2'-deoxyadenosine-3'-phosphorothioate
  modified_base 8: mod_base = OTHER; note = 2'-deoxythymidine-3'-phosphorothioate
  modified_base 9: mod_base = OTHER; note = 2'-deoxyguanosine-3'-phosphorothioate
  modified_base 10: mod_base = OTHER; note = 2'-deoxyguanosine-3'-phosphorothioate
  modified_base 11: mod_base = OTHER; note = 5'-methyl-deoxycytidine-3'-phosphorothioate
  modified_base 12: mod_base = OTHER; note = 2'-deoxythymidine-3'-phosphorothioate
  modified_base 13: mod_base = OTHER; note = 2'-deoxythymidine-3'-phosphorothioate
  modified_base 14: mod_base = OTHER; note = 2'-deoxyguanosine-3'-phosphorothioate
  modified_base 15: mod_base = OTHER; note = 2'-deoxyguanosine-3'-phosphorothioate
  modified_base 16: mod_base = OTHER; note = 2'-O-methyladenosine-3'-phosphorothioate
  modified_base 17: mod_base = OTHER; note = 2'-O-methylguanosine-3'-phosphorothioate
  modified_base 18: mod_base = OTHER; note = 2'-O-methylguanosine-3'-phosphorothioate
  modified_base 19: mod_base = OTHER; note = 2'-O-methyladenosine-3'-phosphorothioate
  modified_base 20: mod_base = OTHER; note = 2'-O-methyluridine
  misc_feature 1..5: note = RNA
  misc_feature 16..20: note = RNA
  misc_feature 6..15: note = DNA
acttgaatggcttggaggat

SEQ ID NO: 514 - DNA, 20 bp, synthetic construct
  source 1..20: mol_type = other DNA
  modified_base 1: mod_base = OTHER; note = 2'-O-methyluridine-3'-phosphorothioate
  modified_base 2: mod_base = OTHER; note = 2'-O-methylcytidine-3'-phosphorothioate
  modified_base 3: mod_base = OTHER; note = 2'-O-methyluridine-3'-phosphorothioate
  modified_base 4: mod_base = OTHER; note = 2'-O-methylguanosine-3'-phosphorothioate
  modified_base 5: mod_base = OTHER; note = 2'-O-methylguanosine-3'-phosphorothioate
  modified_base 6: mod_base = OTHER; note = 2'-deoxyadenosine-3'-phosphorothioate
  modified_base 7: mod_base = OTHER; note = 2'-deoxyadenosine-3'-phosphorothioate
  modified_base 8: mod_base = OTHER; note = 2'-deoxyadenosine-3'-phosphorothioate
  modified_base 9: mod_base = OTHER; note = 2'-deoxyguanosine-3'-phosphorothioate
  modified_base 10: mod_base = OTHER; note = 2'-deoxyguanosine-3'-phosphorothioate
  modified_base 11: mod_base = OTHER; note = 2'-deoxyadenosine-3'-phosphorothioate
  modified_base 12: mod_base = OTHER; note = 2'-deoxyadenosine-3'-phosphorothioate
  modified_base 13: mod_base = OTHER; note = 2'-deoxyadenosine-3'-phosphorothioate
  modified_base 14: mod_base = OTHER; note = 5'-methyl-deoxycytidine-3'-phosphorothioate
  modified_base 15: mod_base = OTHER; note = 2'-deoxythymidine-3'-phosphorothioate
  modified_base 16: mod_base = OTHER; note = 2'-O-methyluridine-3'-phosphorothioate
  modified_base 17: mod_base = OTHER; note = 2'-O-methylguanosine-3'-phosphorothioate
  modified_base 18: mod_base = OTHER; note = 2'-O-methyladenosine-3'-phosphorothioate
  modified_base 19: mod_base = OTHER; note = 2'-O-methyladenosine-3'-phosphorothioate
  modified_base 20: mod_base = OTHER; note = 2'-O-methyluridine
  misc_feature 1..5: note = RNA
  misc_feature 16..20: note = RNA
  misc_feature 6..15: note = DNA
tctggaaaggaaacttgaat

SEQ ID NO: 515 - DNA, 20 bp, synthetic construct
  source 1..20: mol_type = other DNA
  modified_base 1: mod_base = OTHER; note = 2'-O-methylguanosine-3'-phosphorothioate
  modified_base 2: mod_base = OTHER; note = 2'-O-methyluridine-3'-phosphorothioate
  modified_base 3: mod_base = OTHER; note = 2'-O-methyladenosine-3'-phosphorothioate
  modified_base 4: mod_base = OTHER; note = 2'-O-methylguanosine-3'-phosphorothioate
  modified_base 5: mod_base = OTHER; note = 2'-O-methylcytidine-3'-phosphorothioate
  modified_base 6: mod_base = OTHER; note = 2'-deoxyadenosine-3'-phosphorothioate
  modified_base 7: mod_base = OTHER; note = 2'-deoxyguanosine-3'-phosphorothioate
  modified_base 8: mod_base = OTHER; note = 2'-deoxythymidine-3'-phosphorothioate
  modified_base 9: mod_base = OTHER; note = 2'-deoxythymidine-3'-phosphorothioate
  modified_base 10: mod_base = OTHER; note = 2'-deoxyguanosine-3'-phosphorothioate
  modified_base 11: mod_base = OTHER; note = 5'-methyl-deoxycytidine-3'-phosphorothioate
  modified_base 12: mod_base = OTHER; note = 2'-deoxythymidine-3'-phosphorothioate
  modified_base 13: mod_base = OTHER; note = 2'-deoxythymidine-3'-phosphorothioate
  modified_base 14: mod_base = OTHER; note = 5'-methyl-deoxycytidine-3'-phosphorothioate
  modified_base 15: mod_base = OTHER; note = 2'-deoxythymidine-3'-phosphorothioate
  modified_base 16: mod_base = OTHER; note = 2'-O-methylguanosine-3'-phosphorothioate
  modified_base 17: mod_base = OTHER; note = 2'-O-methylguanosine-3'-phosphorothioate
  modified_base 18: mod_base = OTHER; note = 2'-O-methyladenosine-3'-phosphorothioate
  modified_base 19: mod_base = OTHER; note = 2'-O-methyladenosine-3'-phosphorothioate
  modified_base 20: mod_base = OTHER; note = 2'-O-methyladenosine
  misc_feature 1..5: note = RNA
  misc_feature 16..20: note = RNA
  misc_feature 6..15: note = DNA
gtagcagttgcttctggaaa

SEQ ID NO: 516 - DNA, 20 bp, synthetic construct
  source 1..20: mol_type = other DNA
  modified_base 1: mod_base = OTHER; note = 2'-O-methyladenosine-3'-phosphorothioate
  modified_base 2: mod_base = OTHER; note = 2'-O-methyluridine-3'-phosphorothioate
  modified_base 3: mod_base = OTHER; note = 2'-O-methylguanosine-3'-phosphorothioate
  modified_base 4: mod_base = OTHER; note = 2'-O-methyladenosine-3'-phosphorothioate
  modified_base 5: mod_base = OTHER; note = 2'-O-methyladenosine-3'-phosphorothioate
  modified_base 6: mod_base = OTHER; note = 2'-deoxyadenosine-3'-phosphorothioate
  modified_base 7: mod_base = OTHER; note = 2'-deoxyguanosine-3'-phosphorothioate
  modified_base 8: mod_base = OTHER; note = 2'-deoxyguanosine-3'-phosphorothioate
  modified_base 9: mod_base = OTHER; note = 5'-methyl-deoxycytidine-3'-phosphorothioate
  modified_base 10: mod_base = OTHER; note = 2'-deoxyadenosine-3'-phosphorothioate
  modified_base 11: mod_base = OTHER; note = 2'-deoxyguanosine-3'-phosphorothioate
  modified_base 12: mod_base = OTHER; note = 2'-deoxythymidine-3'-phosphorothioate
  modified_base 13: mod_base = OTHER; note = 2'-deoxyadenosine-3'-phosphorothioate
  modified_base 14: mod_base = OTHER; note = 2'-deoxyguanosine-3'-phosphorothioate
  modified_base 15: mod_base = OTHER; note = 5'-methyl-deoxycytidine-3'-phosphorothioate
  modified_base 16: mod_base = OTHER; note = 2'-O-methyladenosine-3'-phosphorothioate
  modified_base 17: mod_base = OTHER; note = 2'-O-methylguanosine-3'-phosphorothioate
  modified_base 18: mod_base = OTHER; note = 2'-O-methyluridine-3'-phosphorothioate
  modified_base 19: mod_base = OTHER; note = 2'-O-methyluridine-3'-phosphorothioate
  modified_base 20: mod_base = OTHER; note = 2'-O-methylguanosine
  misc_feature 1..5: note = RNA
  misc_feature 16..20: note = RNA
  misc_feature 6..15: note = DNA
atgaaaggcagtagcagttg

SEQ ID NO: 517 - DNA, 20 bp, synthetic construct
  source 1..20: mol_type = other DNA
  modified_base 1: mod_base = OTHER; note = 2'-O-methyladenosine-3'-phosphorothioate
  modified_base 2: mod_base = OTHER; note = 2'-O-methyladenosine-3'-phosphorothioate
  modified_base 3: mod_base = OTHER; note = 2'-O-methylguanosine-3'-phosphorothioate
  modified_base 4: mod_base = OTHER; note = 2'-O-methyladenosine-3'-phosphorothioate
  modified_base 5: mod_base = OTHER; note = 2'-O-methyladenosine-3'-phosphorothioate
  modified_base 6: mod_base = OTHER; note = 5'-methyl-deoxycytidine-3'-phosphorothioate
  modified_base 7: mod_base = OTHER; note = 2'-deoxyadenosine-3'-phosphorothioate
  modified_base 8: mod_base = OTHER; note = 2'-deoxythymidine-3'-phosphorothioate
  modified_base 9: mod_base = OTHER; note = 2'-deoxyadenosine-3'-phosphorothioate
  modified_base 10: mod_base = OTHER; note = 2'-deoxythymidine-3'-phosphorothioate
  modified_base 11: mod_base = OTHER; note = 2'-deoxyguanosine-3'-phosphorothioate
  modified_base 12: mod_base = OTHER; note = 2'-deoxyadenosine-3'-phosphorothioate
  modified_base 13: mod_base = OTHER; note = 2'-deoxyadenosine-3'-phosphorothioate
  modified_base 14: mod_base = OTHER; note = 2'-deoxythymidine-3'-phosphorothioate
  modified_base 15: mod_base = OTHER; note = 2'-deoxyguanosine-3'-phosphorothioate
  modified_base 16: mod_base = OTHER; note = 2'-O-methyladenosine-3'-phosphorothioate
  modified_base 17: mod_base = OTHER; note = 2'-O-methyladenosine-3'-phosphorothioate
  modified_base 18: mod_base = OTHER; note = 2'-O-methyladenosine-3'-phosphorothioate
  modified_base 19: mod_base = OTHER; note = 2'-O-methylguanosine-3'-phosphorothioate
  modified_base 20: mod_base = OTHER; note = 2'-O-methylguanosine
  misc_feature 1..5: note = RNA
  misc_feature 16..20: note = RNA
  misc_feature 6..15: note = DNA
aagaacatatgaatgaaagg

SEQ ID NO: 518 - DNA, 20 bp, synthetic construct
  source 1..20: mol_type = other DNA
  modified_base 1: mod_base = OTHER; note = 2'-O-methylcytidine-3'-phosphorothioate
  modified_base 2: mod_base = OTHER; note = 2'-O-methyluridine-3'-phosphorothioate
  modified_base 3: mod_base = OTHER; note = 2'-O-methyladenosine-3'-phosphorothioate
  modified_base 4: mod_base = OTHER; note = 2'-O-methyluridine-3'-phosphorothioate
  modified_base 5: mod_base = OTHER; note = 2'-O-methylcytidine-3'-phosphorothioate
  modified_base 6: mod_base = OTHER; note = 2'-deoxythymidine-3'-phosphorothioate
  modified_base 7: mod_base = OTHER; note = 2'-deoxythymidine-3'-phosphorothioate
  modified_base 8: mod_base = OTHER; note = 2'-deoxythymidine-3'-phosphorothioate
  modified_base 9: mod_base = OTHER; note = 2'-deoxyadenosine-3'-phosphorothioate
  modified_base 10: mod_base = OTHER; note = 2'-deoxyguanosine-3'-phosphorothioate
  modified_base 11: mod_base = OTHER; note = 2'-deoxyadenosine-3'-phosphorothioate
  modified_base 12: mod_base = OTHER; note = 2'-deoxyadenosine-3'-phosphorothioate
  modified_base 13: mod_base = OTHER; note = 2'-deoxyguanosine-3'-phosphorothioate
  modified_base 14: mod_base = OTHER; note = 2'-deoxyadenosine-3'-phosphorothioate
  modified_base 15: mod_base = OTHER; note = 2'-deoxyadenosine-3'-phosphorothioate
  modified_base 16: mod_base = OTHER; note = 2'-O-methylcytidine-3'-phosphorothioate
  modified_base 17: mod_base = OTHER; note = 2'-O-methyladenosine-3'-phosphorothioate
  modified_base 18: mod_base = OTHER; note = 2'-O-methyluridine-3'-phosphorothioate
  modified_base 19: mod_base = OTHER; note = 2'-O-methyladenosine-3'-phosphorothioate
  modified_base 20: mod_base = OTHER; note = 2'-O-methyluridine
  misc_feature 1..5: note = RNA
  misc_feature 16..20: note = RNA
  misc_feature 6..15: note = DNA
ctatctttagaagaacatat

SEQ ID NO: 519 - DNA, 20 bp, synthetic construct
  source 1..20: mol_type = other DNA
  modified_base 1: mod_base = OTHER; note = 2'-O-methylcytidine-3'-phosphorothioate
  modified_base 2: mod_base = OTHER; note = 2'-O-methylcytidine-3'-phosphorothioate
  modified_base 3: mod_base = OTHER; note = 2'-O-methyladenosine-3'-phosphorothioate
  modified_base 4: mod_base = OTHER; note = 2'-O-methyladenosine-3'-phosphorothioate
  modified_base 5: mod_base = OTHER; note = 2'-O-methyladenosine-3'-phosphorothioate
  modified_base 6: mod_base = OTHER; note = 2'-deoxythymidine-3'-phosphorothioate
  modified_base 7: mod_base = OTHER; note = 2'-deoxyguanosine-3'-phosphorothioate
  modified_base 8: mod_base = OTHER; note = 2'-deoxythymidine-3'-phosphorothioate
  modified_base 9: mod_base = OTHER; note = 2'-deoxyadenosine-3'-phosphorothioate
  modified_base 10: mod_base = OTHER; note = 2'-deoxyguanosine-3'-phosphorothioate
  modified_base 11: mod_base = OTHER; note = 2'-deoxyadenosine-3'-phosphorothioate
  modified_base 12: mod_base = OTHER; note = 5'-methyl-deoxycytidine-3'-phosphorothioate
  modified_base 13: mod_base = OTHER; note = 2'-deoxythymidine-3'-phosphorothioate
  modified_base 14: mod_base = OTHER; note = 2'-deoxyadenosine-3'-phosphorothioate
  modified_base 15: mod_base = OTHER; note = 2'-deoxythymidine-3'-phosphorothioate
  modified_base 16: mod_base = OTHER; note = 2'-O-methylcytidine-3'-phosphorothioate
  modified_base 17: mod_base = OTHER; note = 2'-O-methyluridine-3'-phosphorothioate
  modified_base 18: mod_base = OTHER; note = 2'-O-methyluridine-3'-phosphorothioate
  modified_base 19: mod_base = OTHER; note = 2'-O-methyluridine-3'-phosphorothioate
  modified_base 20: mod_base = OTHER; note = 2'-O-methyladenosine
  misc_feature 1..5: note = RNA
  misc_feature 16..20: note = RNA
  misc_feature 6..15: note = DNA
ccaaatgtagactatcttta

SEQ ID NO: 520 - DNA, 20 bp, synthetic construct
  source 1..20: mol_type = other DNA
  modified_base 1: mod_base = OTHER; note = 2'-O-methyladenosine-3'-phosphorothioate
  modified_base 2: mod_base = OTHER; note = 2'-O-methylcytidine-3'-phosphorothioate
  modified_base 3: mod_base = OTHER; note = 2'-O-methyladenosine-3'-phosphorothioate
  modified_base 4: mod_base = OTHER; note = 2'-O-methyluridine-3'-phosphorothioate
  modified_base 5: mod_base = OTHER; note = 2'-O-methyladenosine-3'-phosphorothioate
  modified_base 6: mod_base = OTHER; note = 5'-methyl-deoxycytidine-3'-phosphorothioate
  modified_base 7: mod_base = OTHER; note = 2'-deoxyadenosine-3'-phosphorothioate
  modified_base 8: mod_base = OTHER; note = 2'-deoxythymidine-3'-phosphorothioate
  modified_base 9: mod_base = OTHER; note = 2'-deoxythymidine-3'-phosphorothioate
  modified_base 10: mod_base = OTHER; note = 2'-deoxythymidine-3'-phosphorothioate
  modified_base 11: mod_base = OTHER; note = 5'-methyl-deoxycytidine-3'-phosphorothioate
  modified_base 12: mod_base = OTHER; note = 5'-methyl-deoxycytidine-3'-phosphorothioate
  modified_base 13: mod_base = OTHER; note = 2'-deoxyadenosine-3'-phosphorothioate
  modified_base 14: mod_base = OTHER; note = 2'-deoxyadenosine-3'-phosphorothioate
  modified_base 15: mod_base = OTHER; note = 2'-deoxyadenosine-3'-phosphorothioate
  modified_base 16: mod_base = OTHER; note = 2'-O-methyluridine-3'-phosphorothioate
  modified_base 17: mod_base = OTHER; note = 2'-O-methylguanosine-3'-phosphorothioate
  modified_base 18: mod_base = OTHER; note = 2'-O-methyluridine-3'-phosphorothioate
  modified_base 19: mod_base = OTHER; note = 2'-O-methyladenosine-3'-phosphorothioate
  modified_base 20: mod_base = OTHER; note = 2'-O-methylguanosine
  misc_feature 1..5: note = RNA
  misc_feature 16..20: note = RNA
  misc_feature 6..15: note = DNA
acatacatttccaaatgtag

SEQ ID NO: 521 - DNA, 20 bp, synthetic construct
  source 1..20: mol_type = other DNA
  modified_base 1: mod_base = OTHER; note = 2'-O-methyladenosine-3'-phosphorothioate
  modified_base 2: mod_base = OTHER; note = 2'-O-methylcytidine-3'-phosphorothioate
  modified_base 3: mod_base = OTHER; note = 2'-O-methylguanosine-3'-phosphorothioate
  modified_base 4: mod_base = OTHER; note = 2'-O-methyluridine-3'-phosphorothioate
  modified_base 5: mod_base = OTHER; note = 2'-O-methylguanosine-3'-phosphorothioate
  modified_base 6: mod_base = OTHER; note = 5'-methyl-deoxycytidine-3'-phosphorothioate
  modified_base 7: mod_base = OTHER; note = 2'-deoxythymidine-3'-phosphorothioate
  modified_base 8: mod_base = OTHER; note = 2'-deoxythymidine-3'-phosphorothioate
  modified_base 9: mod_base = OTHER; note = 2'-deoxythymidine-3'-phosphorothioate
  modified_base 10: mod_base = OTHER; note = 2'-deoxythymidine-3'-phosphorothioate
  modified_base 11: mod_base = OTHER; note = 2'-deoxyadenosine-3'-phosphorothioate
  modified_base 12: mod_base = OTHER; note = 2'-deoxyadenosine-3'-phosphorothioate
  modified_base 13: mod_base = OTHER; note = 5'-methyl-deoxycytidine-3'-phosphorothioate
  modified_base 14: mod_base = OTHER; note = 2'-deoxyadenosine-3'-phosphorothioate
  modified_base 15: mod_base = OTHER; note = 2'-deoxythymidine-3'-phosphorothioate
  modified_base 16: mod_base = OTHER; note = 2'-O-methyladenosine-3'-phosphorothioate
  modified_base 17: mod_base = OTHER; note = 2'-O-methylcytidine-3'-phosphorothioate
  modified_base 18: mod_base = OTHER; note = 2'-O-methyladenosine-3'-phosphorothioate
  modified_base 19: mod_base = OTHER; note = 2'-O-methyluridine-3'-phosphorothioate
  modified_base 20: mod_base = OTHER; note = 2'-O-methyluridine
  misc_feature 1..5: note = RNA
  misc_feature 16..20: note = RNA
  misc_feature 6..15: note = DNA
acgtgcttttaacatacatt

SEQ ID NO: 522 - DNA, 20 bp, synthetic construct
  source 1..20: mol_type = other DNA
  modified_base 1: mod_base = OTHER; note = 2'-O-methyladenosine-3'-phosphorothioate
  modified_base 2: mod_base = OTHER; note = 2'-O-methyluridine-3'-phosphorothioate
  modified_base 3: mod_base = OTHER; note = 2'-O-methyluridine-3'-phosphorothioate
  modified_base 4: mod_base = OTHER; note = 2'-O-methyluridine-3'-phosphorothioate
  modified_base 5: mod_base = OTHER; note = 2'-O-methyluridine-3'-phosphorothioate
  modified_base 6: mod_base = OTHER; note = 2'-deoxyadenosine-3'-phosphorothioate
  modified_base 7: mod_base = OTHER; note = 2'-deoxyadenosine-3'-phosphorothioate
  modified_base 8: mod_base = OTHER; note = 2'-deoxyadenosine-3'-phosphorothioate
  modified_base 9: mod_base = OTHER; note = 2'-deoxyadenosine-3'-phosphorothioate
  modified_base 10: mod_base = OTHER; note = 2'-deoxyadenosine-3'-phosphorothioate
  modified_base 11: mod_base = OTHER; note = 2'-deoxythymidine-3'-phosphorothioate
  modified_base 12: mod_base = OTHER; note = 2'-deoxyadenosine-3'-phosphorothioate
  modified_base 13: mod_base = OTHER; note = 5'-methyl-deoxycytidine-3'-phosphorothioate
  modified_base 14: mod_base = OTHER; note = 2'-deoxyguanosine-3'-phosphorothioate
  modified_base 15: mod_base = OTHER; note = 2'-deoxythymidine-3'-phosphorothioate
  modified_base 16: mod_base = OTHER; note = 2'-O-methylguanosine-3'-phosphorothioate
  modified_base 17: mod_base = OTHER; note = 2'-O-methylcytidine-3'-phosphorothioate
  modified_base 18: mod_base = OTHER; note = 2'-O-methyluridine-3'-phosphorothioate
  modified_base 19: mod_base = OTHER; note = 2'-O-methyluridine-3'-phosphorothioate
  modified_base 20: mod_base = OTHER; note = 2'-O-methyluridine
  misc_feature 1..5: note = RNA
  misc_feature 16..20: note = RNA
  misc_feature 6..15: note = DNA
attttaaaaatacgtgcttt

SEQ ID NO: 523 - DNA, 20 bp, synthetic construct
  source 1..20: mol_type = other DNA
  modified_base 1: mod_base = OTHER; note = 2'-O-methyluridine-3'-phosphorothioate
  modified_base 2: mod_base = OTHER; note = 2'-O-methyluridine-3'-phosphorothioate
  modified_base 3: mod_base = OTHER; note = 2'-O-methyladenosine-3'-phosphorothioate
  modified_base 4: mod_base = OTHER; note = 2'-O-methylguanosine-3'-phosphorothioate
  modified_base 5: mod_base = OTHER; note = 2'-O-methylguanosine-3'-phosphorothioate
  modified_base 6: mod_base = OTHER; note = 2'-deoxyadenosine-3'-phosphorothioate
  modified_base 7: mod_base = OTHER; note = 2'-deoxyadenosine-3'-phosphorothioate
  modified_base 8: mod_base = OTHER; note = 2'-deoxyadenosine-3'-phosphorothioate
  modified_base 9: mod_base = OTHER; note = 2'-deoxyadenosine-3'-phosphorothioate
  modified_base 10: mod_base = OTHER; note = 2'-deoxyadenosine-3'-phosphorothioate
  modified_base 11: mod_base = OTHER; note = 2'-deoxyadenosine-3'-phosphorothioate
  modified_base 12: mod_base = OTHER; note = 2'-deoxyadenosine-3'-phosphorothioate
  modified_base 13: mod_base = OTHER; note = 2'-deoxythymidine-3'-phosphorothioate
  modified_base 14: mod_base = OTHER; note = 2'-deoxythymidine-3'-phosphorothioate
  modified_base 15: mod_base = OTHER; note = 2'-deoxythymidine-3'-phosphorothioate
  modified_base 16: mod_base = OTHER; note = 2'-O-methyluridine-3'-phosphorothioate
  modified_base 17: mod_base = OTHER; note = 2'-O-methyladenosine-3'-phosphorothioate
  modified_base 18: mod_base = OTHER; note = 2'-O-methyladenosine-3'-phosphorothioate
  modified_base 19: mod_base = OTHER; note = 2'-O-methyladenosine-3'-phosphorothioate
  modified_base 20: mod_base = OTHER; note = 2'-O-methyladenosine
  misc_feature 1..5: note = RNA
  misc_feature 16..20: note = RNA
  misc_feature 6..15: note = DNA
ttaggaaaaaaattttaaaa

SEQ ID NO: 524 - DNA, 20 bp, synthetic construct
  source 1..20: mol_type = other DNA
  modified_base 1: mod_base = OTHER; note = 2'-O-methyladenosine-3'-phosphorothioate
  modified_base 2: mod_base = OTHER; note = 2'-O-methyluridine-3'-phosphorothioate
  modified_base 3: mod_base = OTHER; note = 2'-O-methylguanosine-3'-phosphorothioate
  modified_base 4: mod_base = OTHER; note = 2'-O-methyluridine-3'-phosphorothioate
  modified_base 5: mod_base = OTHER; note = 2'-O-methylguanosine-3'-phosphorothioate
  modified_base 6: mod_base = OTHER; note = 2'-deoxythymidine-3'-phosphorothioate
  modified_base 7: mod_base = OTHER; note = 2'-deoxythymidine-3'-phosphorothioate
  modified_base 8: mod_base = OTHER; note = 2'-deoxyadenosine-3'-phosphorothioate
  modified_base 9: mod_base = OTHER; note = 5'-methyl-deoxycytidine-3'-phosphorothioate
  modified_base 10: mod_base = OTHER; note = 2'-deoxythymidine-3'-phosphorothioate
  modified_base 11: mod_base = OTHER; note = 2'-deoxyadenosine-3'-phosphorothioate
  modified_base 12: mod_base = OTHER; note = 2'-deoxythymidine-3'-phosphorothioate
  modified_base 13: mod_base = OTHER; note = 2'-deoxythymidine-3'-phosphorothioate
  modified_base 14: mod_base = OTHER; note = 2'-deoxythymidine-3'-phosphorothioate
  modified_base 15: mod_base = OTHER; note = 2'-deoxyadenosine-3'-phosphorothioate
  modified_base 16: mod_base = OTHER; note = 2'-O-methylguanosine-3'-phosphorothioate
  modified_base 17: mod_base = OTHER; note = 2'-O-methylguanosine-3'-phosphorothioate
  modified_base 18: mod_base = OTHER; note = 2'-O-methyladenosine-3'-phosphorothioate
  modified_base 19: mod_base = OTHER; note = 2'-O-methyladenosine-3'-phosphorothioate
  modified_base 20: mod_base = OTHER; note = 2'-O-methyladenosine
  misc_feature 1..5: note = RNA
  misc_feature 16..20: note = RNA
  misc_feature 6..15: note = DNA
atgtgttactatttaggaaa

SEQ ID NO: 525 - DNA, 20 bp, synthetic construct
  source 1..20: mol_type = other DNA
  modified_base 1: mod_base = OTHER; note = 2'-O-methylguanosine-3'-phosphorothioate
  modified_base 2: mod_base = OTHER; note = 2'-O-methylcytidine-3'-phosphorothioate
  modified_base 3: mod_base = OTHER; note = 2'-O-methyladenosine-3'-phosphorothioate
  modified_base 4: mod_base = OTHER; note = 2'-O-methylguanosine-3'-phosphorothioate
  modified_base 5: mod_base = OTHER; note = 2'-O-methyladenosine-3'-phosphorothioate
  modified_base 6: mod_base = OTHER; note = 5'-methyl-deoxycytidine-3'-phosphorothioate
  modified_base 7: mod_base = OTHER; note = 2'-deoxyadenosine-3'-phosphorothioate
  modified_base 8: mod_base = OTHER; note = 2'-deoxythymidine-3'-phosphorothioate
  modified_base 9: mod_base = OTHER; note = 2'-deoxyadenosine-3'-phosphorothioate
  modified_base 10: mod_base = OTHER; note = 5'-methyl-deoxycytidine-3'-phosphorothioate
  modified_base 11: mod_base = OTHER; note = 2'-deoxyadenosine-3'-phosphorothioate
  modified_base 12: mod_base = OTHER; note = 2'-deoxyadenosine-3'-phosphorothioate
  modified_base 13: mod_base = OTHER; note = 2'-deoxythymidine-3'-phosphorothioate
  modified_base 14: mod_base = OTHER; note = 2'-deoxyguanosine-3'-phosphorothioate
  modified_base 15: mod_base = OTHER; note = 2'-deoxythymidine-3'-phosphorothioate
  modified_base 16: mod_base = OTHER; note = 2'-O-methylguanosine-3'-phosphorothioate
  modified_base 17: mod_base = OTHER; note = 2'-O-methyluridine-3'-phosphorothioate
  modified_base 18: mod_base = OTHER; note = 2'-O-methyluridine-3'-phosphorothioate
  modified_base 19: mod_base = OTHER; note = 2'-O-methyladenosine-3'-phosphorothioate
  modified_base 20: mod_base = OTHER; note = 2'-O-methylcytidine
  misc_feature 1..5: note = RNA
  misc_feature 16..20: note = RNA
  misc_feature 6..15: note = DNA
gcagacatacaatgtgttac

SEQ ID NO: 526 - DNA, 20 bp, synthetic construct
  source 1..20: mol_type = other DNA
  modified_base 1: mod_base = OTHER; note = 2'-O-methyladenosine-3'-phosphorothioate
  modified_base 2: mod_base = OTHER; note = 2'-O-methyladenosine-3'-phosphorothioate
  modified_base 3: mod_base = OTHER; note = 2'-O-methyladenosine-3'-phosphorothioate
  modified_base 4: mod_base = OTHER; note = 2'-O-methylguanosine-3'-phosphorothioate
  modified_base 5: mod_base = OTHER; note = 2'-O-methyluridine-3'-phosphorothioate
  modified_base 6: mod_base = OTHER; note = 2'-deoxyadenosine-3'-phosphorothioate
  modified_base 7: mod_base = OTHER; note = 5'-methyl-deoxycytidine-3'-phosphorothioate
  modified_base 8: mod_base = OTHER; note = 2'-deoxyadenosine-3'-phosphorothioate
  modified_base 9: mod_base = OTHER; note = 5'-methyl-deoxycytidine-3'-phosphorothioate
  modified_base 10: mod_base = OTHER; note = 2'-deoxyadenosine-3'-phosphorothioate
  modified_base 11: mod_base = OTHER; note = 2'-deoxyguanosine-3'-phosphorothioate
  modified_base 12: mod_base = OTHER; note = 5'-methyl-deoxycytidine-3'-phosphorothioate
  modified_base 13: mod_base = OTHER; note = 2'-deoxyadenosine-3'-phosphorothioate
  modified_base 14: mod_base = OTHER; note = 2'-deoxyguanosine-3'-phosphorothioate
  modified_base 15: mod_base = OTHER; note = 2'-deoxyadenosine-3'-phosphorothioate
  modified_base 16: mod_base = OTHER; note = 2'-O-methylcytidine-3'-phosphorothioate
  modified_base 17: mod_base = OTHER; note = 2'-O-methyladenosine-3'-phosphorothioate
  modified_base 18: mod_base = OTHER; note = 2'-O-methyluridine-3'-phosphorothioate
  modified_base 19: mod_base = OTHER; note = 2'-O-methyladenosine-3'-phosphorothioate
  modified_base 20: mod_base = OTHER; note = 2'-O-methylcytidine
  misc_feature 1..5: note = RNA
  misc_feature 16..20: note = RNA
  misc_feature 6..15: note = DNA
aaagtacacagcagacatac

SEQ ID NO: 527 - DNA, 20 bp, synthetic construct
  source 1..20: mol_type = other DNA
  modified_base 1: mod_base = OTHER; note = 2'-O-methyladenosine-3'-phosphorothioate
  modified_base 2: mod_base = OTHER; note = 2'-O-methyladenosine-3'-phosphorothioate
  modified_base 3: mod_base = OTHER; note = 2'-O-methyladenosine-3'-phosphorothioate
  modified_base 4: mod_base = OTHER; note = 2'-O-methyluridine-3'-phosphorothioate
  modified_base 5: mod_base = OTHER; note = 2'-O-methyladenosine-3'-phosphorothioate
  modified_base 6: mod_base = OTHER; note = 2'-deoxyadenosine-3'-phosphorothioate
  modified_base 7: mod_base = OTHER; note = 2'-deoxyadenosine-3'-phosphorothioate
  modified_base 8: mod_base = OTHER; note = 2'-deoxyadenosine-3'-phosphorothioate
  modified_base 9: mod_base = OTHER; note = 2'-deoxyadenosine-3'-phosphorothioate
  modified_base 10: mod_base = OTHER; note = 2'-deoxythymidine-3'-phosphorothioate
  modified_base 11: mod_base = OTHER; note = 2'-deoxyadenosine-3'-phosphorothioate
  modified_base 12: mod_base = OTHER; note = 2'-deoxyguanosine-3'-phosphorothioate
  modified_base 13: mod_base = OTHER; note = 5'-methyl-deoxycytidine-3'-phosphorothioate
  modified_base 14: mod_base = OTHER; note = 2'-deoxyadenosine-3'-phosphorothioate
  modified_base 15: mod_base = OTHER; note = 2'-deoxyadenosine-3'-phosphorothioate
  modified_base 16: mod_base = OTHER; note = 2'-O-methyladenosine-3'-phosphorothioate
  modified_base 17: mod_base = OTHER; note = 2'-O-methylguanosine-3'-phosphorothioate
  modified_base 18: mod_base = OTHER; note = 2'-O-methyluridine-3'-phosphorothioate
  modified_base 19: mod_base = OTHER; note = 2'-O-methyladenosine-3'-phosphorothioate
  modified_base 20: mod_base = OTHER; note = 2'-O-methylcytidine
  misc_feature 1..5: note = RNA
  misc_feature 16..20: note = RNA
  misc_feature 6..15: note = DNA
aaataaaaatagcaaagtac

SEQ ID NO: 528 - DNA, 20 bp, synthetic construct
  source 1..20: mol_type = other DNA
  modified_base 1: mod_base = OTHER; note = 2'-O-methyladenosine-3'-phosphorothioate
  modified_base 2: mod_base = OTHER; note = 2'-O-methylcytidine-3'-phosphorothioate
  modified_base 3: mod_base = OTHER; note = 2'-O-methyladenosine-3'-phosphorothioate
  modified_base 4: mod_base = OTHER; note = 2'-O-methylcytidine-3'-phosphorothioate
  modified_base 5: mod_base = OTHER; note = 2'-O-methyluridine-3'-phosphorothioate
  modified_base 6: mod_base = OTHER; note = 2'-deoxyadenosine-3'-phosphorothioate
  modified_base 7: mod_base = OTHER; note = 2'-deoxyadenosine-3'-phosphorothioate
  modified_base 8: mod_base = OTHER; note = 2'-deoxyadenosine-3'-phosphorothioate
  modified_base 9: mod_base = OTHER; note = 2'-deoxyadenosine-3'-phosphorothioate
  modified_base 10: mod_base = OTHER; note = 2'-deoxythymidine-3'-phosphorothioate
  modified_base 11: mod_base = OTHER; note = 2'-deoxyadenosine-3'-phosphorothioate
  modified_base 12: mod_base = OTHER; note = 2'-deoxyadenosine-3'-phosphorothioate
  modified_base 13: mod_base = OTHER; note = 2'-deoxyadenosine-3'-phosphorothioate
  modified_base 14: mod_base = OTHER; note = 2'-deoxythymidine-3'-phosphorothioate
  modified_base 15: mod_base = OTHER; note = 2'-deoxyadenosine-3'-phosphorothioate
  modified_base 16: mod_base = OTHER; note = 2'-O-methyladenosine-3'-phosphorothioate
  modified_base 17: mod_base = OTHER; note = 2'-O-methyladenosine-3'-phosphorothioate
  modified_base 18: mod_base = OTHER; note = 2'-O-methyladenosine-3'-phosphorothioate
  modified_base 19: mod_base = OTHER; note = 2'-O-methyladenosine-3'-phosphorothioate
  modified_base 20: mod_base = OTHER; note = 2'-O-methyluridine
  misc_feature 1..5: note = RNA
  misc_feature 16..20: note = RNA
  misc_feature 6..15: note = DNA
acactaaaataaataaaaat

SEQ ID NO: 529 - DNA, 20 bp, synthetic construct
  source 1..20: mol_type = other DNA
  modified_base 1: mod_base = OTHER; note = 2'-O-methylcytidine-3'-phosphorothioate
  modified_base 2: mod_base = OTHER; note = 2'-O-methyluridine-3'-phosphorothioate
  modified_base 3: mod_base = OTHER; note = 2'-O-methyladenosine-3'-phosphorothioate
  modified_base 4: mod_base = OTHER; note = 2'-O-methyluridine-3'-phosphorothioate
  modified_base 5: mod_base = OTHER; note = 2'-O-methyladenosine-3'-phosphorothioate
  modified_base 6: mod_base = OTHER; note = 2'-deoxythymidine-3'-phosphorothioate
  modified_base 7: mod_base = OTHER; note = 2'-deoxyadenosine-3'-phosphorothioate
  modified_base 8: mod_base = OTHER; note = 2'-deoxyadenosine-3'-phosphorothioate
  modified_base 9: mod_base = OTHER; note = 2'-deoxyguanosine-3'-phosphorothioate
  modified_base 10: mod_base = OTHER; note = 2'-deoxyadenosine-3'-phosphorothioate
  modified_base 11: mod_base = OTHER; note = 2'-deoxyadenosine-3'-phosphorothioate
  modified_base 12: mod_base = OTHER; note = 2'-deoxyadenosine-3'-phosphorothioate
  modified_base 13: mod_base = OTHER; note = 5'-methyl-deoxycytidine-3'-phosphorothioate
  modified_base 14: mod_base = OTHER; note = 2'-deoxyadenosine-3'-phosphorothioate
  modified_base 15: mod_base = OTHER; note = 5'-methyl-deoxycytidine-3'-phosphorothioate
  modified_base 16: mod_base = OTHER; note = 2'-O-methyluridine-3'-phosphorothioate
  modified_base 17: mod_base = OTHER; note = 2'-O-methyladenosine-3'-phosphorothioate
  modified_base 18: mod_base = OTHER; note = 2'-O-methyladenosine-3'-phosphorothioate
  modified_base 19: mod_base = OTHER; note = 2'-O-methyladenosine-3'-phosphorothioate
  modified_base 20: mod_base = OTHER; note = 2'-O-methyladenosine
  misc_feature 1..5: note = RNA
  misc_feature 16..20: note = RNA
  misc_feature 6..15: note = DNA
ctatataagaaacactaaaa

SEQ ID NO: 530 - DNA, 20 bp, synthetic construct
  source 1..20: mol_type = other DNA
  modified_base 1: mod_base = OTHER; note = 2'-O-methylcytidine-3'-phosphorothioate
  modified_base 2: mod_base = OTHER; note = 2'-O-methyladenosine-3'-phosphorothioate
  modified_base 3: mod_base = OTHER; note = 2'-O-methyluridine-3'-phosphorothioate
  modified_base 4: mod_base = OTHER; note = 2'-O-methyluridine-3'-phosphorothioate
  modified_base 5: mod_base = OTHER; note = 2'-O-methylcytidine-3'-phosphorothioate
  modified_base 6: mod_base = OTHER; note = 5'-methyl-deoxycytidine-3'-phosphorothioate
  modified_base 7: mod_base = OTHER; note = 2'-deoxyadenosine-3'-phosphorothioate
  modified_base 8: mod_base = OTHER; note = 2'-deoxythymidine-3'-phosphorothioate
  modified_base 9: mod_base = OTHER; note = 5'-methyl-deoxycytidine-3'-phosphorothioate
  modified_base 10: mod_base = OTHER; note = 2'-deoxythymidine-3'-phosphorothioate
  modified_base 11: mod_base = OTHER; note = 2'-deoxyguanosine-3'-phosphorothioate
  modified_base 12: mod_base = OTHER; note = 5'-methyl-deoxycytidine-3'-phosphorothioate
  modified_base 13: mod_base = OTHER; note = 2'-deoxythymidine-3'-phosphorothioate
  modified_base 14: mod_base = OTHER; note = 2'-deoxyadenosine-3'-phosphorothioate
  modified_base 15: mod_base = OTHER; note = 2'-deoxythymidine-3'-phosphorothioate
  modified_base 16: mod_base = OTHER; note = 2'-O-methyladenosine-3'-phosphorothioate
  modified_base 17: mod_base = OTHER; note = 2'-O-methyluridine-3'-phosphorothioate
  modified_base 18: mod_base = OTHER; note = 2'-O-methyladenosine-3'-phosphorothioate
  modified_base 19: mod_base = OTHER; note = 2'-O-methyladenosine-3'-phosphorothioate
  modified_base 20: mod_base = OTHER; note = 2'-O-methylguanosine
  misc_feature 1..5: note = RNA
  misc_feature 16..20: note = RNA
  misc_feature 6..15: note = DNA
cattccatctgctatataag

SEQ ID NO: 531 - DNA, 20 bp, synthetic construct
  source 1..20: mol_type = other DNA
  modified_base 1: mod_base = OTHER; note = 2'-O-methyladenosine-3'-phosphorothioate
  modified_base 2: mod_base = OTHER; note = 2'-O-methylcytidine-3'-phosphorothioate
  modified_base 3: mod_base = OTHER; note = 2'-O-methyluridine-3'-phosphorothioate
  modified_base 4: mod_base = OTHER; note = 2'-O-methyluridine-3'-phosphorothioate
  modified_base 5: mod_base = OTHER; note = 2'-O-methylcytidine-3'-phosphorothioate
  modified_base 6: mod_base = OTHER; note = 2'-deoxyadenosine-3'-phosphorothioate
  modified_base 7: mod_base = OTHER; note = 2'-deoxyadenosine-3'-phosphorothioate
  modified_base 8: mod_base = OTHER; note = 2'-deoxyadenosine-3'-phosphorothioate
  modified_base 9: mod_base = OTHER; note = 2'-deoxythymidine-3'-phosphorothioate
  modified_base 10: mod_base = OTHER; note = 2'-deoxythymidine-3'-phosphorothioate
  modified_base 11: mod_base = OTHER; note = 5'-methyl-deoxycytidine-3'-phosphorothioate
  modified_base 12: mod_base = OTHER; note = 2'-deoxyadenosine-3'-phosphorothioate
  modified_base 13: mod_base = OTHER; note = 2'-deoxythymidine-3'-phosphorothioate
  modified_base 14: mod_base = OTHER; note = 2'-deoxythymidine-3'-phosphorothioate
  modified_base 15: mod_base = OTHER; note = 5'-methyl-deoxycytidine-3'-phosphorothioate
  modified_base 16: mod_base = OTHER; note = 2'-O-methylcytidine-3'-phosphorothioate
  modified_base 17: mod_base = OTHER; note = 2'-O-methyladenosine-3'-phosphorothioate
  modified_base 18: mod_base = OTHER; note = 2'-O-methyluridine-3'-phosphorothioate
  modified_base 19: mod_base = OTHER; note = 2'-O-methylcytidine-3'-phosphorothioate
  modified_base 20: mod_base = OTHER; note = 2'-O-methyluridine
  misc_feature 1..5: note = RNA
  misc_feature 16..20: note = RNA
  misc_feature 6..15: note = DNA
acttcaaattcattccatct

SEQ ID NO: 532 - DNA, 20 bp, synthetic construct
  source 1..20: mol_type = other DNA
  modified_base 1: mod_base = OTHER; note = 2'-O-methylcytidine-3'-phosphorothioate
  modified_base 2: mod_base = OTHER; note = 2'-O-methyladenosine-3'-phosphorothioate
  modified_base 3: mod_base = OTHER; note = 2'-O-methylguanosine-3'-phosphorothioate
  modified_base 4: mod_base = OTHER; note = 2'-O-methylcytidine-3'-phosphorothioate
  modified_base 5: mod_base = OTHER; note = 2'-O-methylcytidine-3'-phosphorothioate
  modified_base 6: mod_base = OTHER; note = 5'-methyl-deoxycytidine-3'-phosphorothioate
  modified_base 7: mod_base = OTHER; note = 2'-deoxythymidine-3'-phosphorothioate
  modified_base 8: mod_base = OTHER; note = 2'-deoxyguanosine-3'-phosphorothioate
  modified_base 9: mod_base = OTHER; note = 2'-deoxyguanosine-3'-phosphorothioate
  modified_base 10: mod_base = OTHER; note = 2'-deoxyguanosine-3'-phosphorothioate
  modified_base 11: mod_base = OTHER; note = 2'-deoxyadenosine-3'-phosphorothioate
  modified_base 12: mod_base = OTHER; note = 2'-deoxyadenosine-3'-phosphorothioate
  modified_base 13: mod_base = OTHER; note = 5'-methyl-deoxycytidine-3'-phosphorothioate
  modified_base 14: mod_base = OTHER; note = 2'-deoxythymidine-3'-phosphorothioate
  modified_base 15: mod_base = OTHER; note = 2'-deoxythymidine-3'-phosphorothioate
  modified_base 16: mod_base = OTHER; note = 2'-O-methylcytidine-3'-phosphorothioate
  modified_base 17: mod_base = OTHER; note = 2'-O-methyladenosine-3'-phosphorothioate
  modified_base 18: mod_base = OTHER; note = 2'-O-methyladenosine-3'-phosphorothioate
  modified_base 19: mod_base = OTHER; note = 2'-O-methyladenosine-3'-phosphorothioate
  modified_base 20: mod_base = OTHER; note = 2'-O-methyluridine
  misc_feature 1..5: note = RNA
  misc_feature 16..20: note = RNA
  misc_feature 6..15: note = DNA
cagccctgggaacttcaaat

SEQ ID NO: 533 - DNA, 20 bp, synthetic construct
  source 1..20: mol_type = other DNA
  modified_base 1: mod_base = OTHER; note = 2'-O-methylguanosine-3'-phosphorothioate
  modified_base 2: mod_base = OTHER; note = 2'-O-methylcytidine-3'-phosphorothioate
  modified_base 3: mod_base = OTHER; note = 2'-O-methyladenosine-3'-phosphorothioate
  modified_base 4: mod_base = OTHER; note = 2'-O-methyluridine-3'-phosphorothioate
  modified_base 5: mod_base = OTHER; note = 2'-O-methylguanosine-3'-phosphorothioate
  modified_base 6: mod_base = OTHER; note = 2'-deoxyguanosine-3'-phosphorothioate
  modified_base 7: mod_base = OTHER; note = 2'-deoxyadenosine-3'-phosphorothioate
  modified_base 8: mod_base = OTHER; note = 2'-deoxythymidine-3'-phosphorothioate
  modified_base 9: mod_base = OTHER; note = 5'-methyl-deoxycytidine-3'-phosphorothioate
  modified_base 10: mod_base = OTHER; note = 5'-methyl-deoxycytidine-3'-phosphorothioate
  modified_base 11: mod_base = OTHER; note = 2'-deoxythymidine-3'-phosphorothioate
  modified_base 12: mod_base = OTHER; note = 5'-methyl-deoxycytidine-3'-phosphorothioate
  modified_base 13: mod_base = OTHER; note = 2'-deoxyadenosine-3'-phosphorothioate
  modified_base 14: mod_base = OTHER; note = 2'-deoxyguanosine-3'-phosphorothioate
  modified_base 15: mod_base = OTHER; note = 5'-methyl-deoxycytidine-3'-phosphorothioate
  modified_base 16: mod_base = OTHER; note = 2'-O-methylcytidine-3'-phosphorothioate
  modified_base 17: mod_base = OTHER; note = 2'-O-methylcytidine-3'-phosphorothioate
  modified_base 18: mod_base = OTHER; note = 2'-O-methyluridine-3'-phosphorothioate
  modified_base 19: mod_base = OTHER; note = 2'-O-methylguanosine-3'-phosphorothioate
  modified_base 20: mod_base = OTHER; note = 2'-O-methylguanosine
  misc_feature 1..5: note = RNA
  misc_feature 16..20: note = RNA
  misc_feature 6..15: note = DNA
gcatggatcctcagccctgg

SEQ ID NO: 534 - DNA, 20 bp, synthetic construct
  source 1..20: mol_type = other DNA
  modified_base 1: mod_base = OTHER; note = 2'-O-methyladenosine-3'-phosphorothioate
  modified_base 2: mod_base = OTHER; note = 2'-O-methyladenosine-3'-phosphorothioate
  modified_base 3: mod_base = OTHER; note = 2'-O-methyladenosine-3'-phosphorothioate
  modified_base 4: mod_base = OTHER; note = 2'-O-methylcytidine-3'-phosphorothioate
  modified_base 5: mod_base = OTHER; note = 2'-O-methyladenosine-3'-phosphorothioate
  modified_base 6: mod_base = OTHER; note = 2'-deoxyadenosine-3'-phosphorothioate
  modified_base 7: mod_base = OTHER; note = 2'-deoxyadenosine-3'-phosphorothioate
  modified_base 8: mod_base = OTHER; note = 2'-deoxyguanosine-3'-phosphorothioate
  modified_base 9: mod_base = OTHER; note = 2'-deoxyadenosine-3'-phosphorothioate
  modified_base 10: mod_base = OTHER; note = 2'-deoxyadenosine-3'-phosphorothioate
  modified_base 11: mod_base = OTHER; note = 2'-deoxyguanosine-3'-phosphorothioate
  modified_base 12: mod_base = OTHER; note = 2'-deoxyguanosine-3'-phosphorothioate
  modified_base 13: mod_base = OTHER; note = 5'-methyl-deoxycytidine-3'-phosphorothioate
  modified_base 14: mod_base = OTHER; note = 2'-deoxyadenosine-3'-phosphorothioate
  modified_base 15: mod_base = OTHER; note = 2'-deoxythymidine-3'-phosphorothioate
  modified_base 16: mod_base = OTHER; note = 2'-O-methylguanosine-3'-phosphorothioate
  modified_base 17: mod_base = OTHER; note = 2'-O-methylguanosine-3'-phosphorothioate
  modified_base 18: mod_base = OTHER; note = 2'-O-methyladenosine-3'-phosphorothioate
  modified_base 19: mod_base = OTHER; note = 2'-O-methyluridine-3'-phosphorothioate
  modified_base 20: mod_base = OTHER; note = 2'-O-methylcytidine
  misc_feature 1..5: note = RNA
  misc_feature 16..20: note = RNA
  misc_feature 6..15: note = DNA
aaacaaagaaggcatggatc

SEQ ID NO: 535 - DNA, 20 bp, synthetic construct
  source 1..20: mol_type = other DNA
  modified_base 1: mod_base = OTHER; note = 2'-O-methyladenosine-3'-phosphorothioate
  modified_base 2: mod_base = OTHER; note = 2'-O-methyladenosine-3'-phosphorothioate
  modified_base 3: mod_base = OTHER; note = 2'-O-methylguanosine-3'-phosphorothioate
  modified_base 4: mod_base = OTHER; note = 2'-O-methyladenosine-3'-phosphorothioate
  modified_base 5: mod_base = OTHER; note = 2'-O-methyluridine-3'-phosphorothioate
  modified_base 6: mod_base = OTHER; note = 2'-deoxyadenosine-3'-phosphorothioate
  modified_base 7: mod_base = OTHER; note = 2'-deoxyadenosine-3'-phosphorothioate
  modified_base 8: mod_base = OTHER; note = 5'-methyl-deoxycytidine-3'-phosphorothioate
  modified_base 9: mod_base = OTHER; note = 2'-deoxythymidine-3'-phosphorothioate
  modified_base 10: mod_base = OTHER; note = 2'-deoxythymidine-3'-phosphorothioate
  modified_base 11: mod_base = OTHER; note = 2'-deoxyadenosine-3'-phosphorothioate
  modified_base 12: mod_base = OTHER; note = 2'-deoxyguanosine-3'-phosphorothioate
  modified_base 13: mod_base = OTHER; note = 2'-deoxyadenosine-3'-phosphorothioate
  modified_base 14: mod_base = OTHER; note = 2'-deoxyadenosine-3'-phosphorothioate
  modified_base 15: mod_base = OTHER; note = 2'-deoxyadenosine-3'-phosphorothioate
  modified_base 16: mod_base = OTHER; note = 2'-O-methylcytidine-3'-phosphorothioate
  modified_base 17: mod_base = OTHER; note = 2'-O-methyladenosine-3'-phosphorothioate
  modified_base 18: mod_base = OTHER; note = 2'-O-methyladenosine-3'-phosphorothioate
  modified_base 19: mod_base = OTHER; note = 2'-O-methyladenosine-3'-phosphorothioate
  modified_base 20: mod_base = OTHER; note = 2'-O-methylguanosine
  misc_feature 1..5: note = RNA
  misc_feature 16..20: note = RNA
  misc_feature 6..15: note = DNA
aagataacttagaaacaaag

SEQ ID NO: 536 - DNA, 20 bp, synthetic construct
  source 1..20: mol_type = other DNA
  modified_base 1: mod_base = OTHER; note = 2'-O-methyladenosine-3'-phosphorothioate
  modified_base 2: mod_base = OTHER; note = 2'-O-methyladenosine-3'-phosphorothioate
  modified_base 3: mod_base = OTHER; note = 2'-O-methyladenosine-3'-phosphorothioate
  modified_base 4: mod_base = OTHER; note = 2'-O-methylguanosine-3'-phosphorothioate
  modified_base 5: mod_base = OTHER; note = 2'-O-methylcytidine-3'-phosphorothioate
  modified_base 6: mod_base = OTHER; note = 2'-deoxythymidine-3'-phosphorothioate
  modified_base 7: mod_base = OTHER; note = 2'-deoxyadenosine-3'-phosphorothioate
  modified_base 8: mod_base = OTHER; note = 2'-deoxythymidine-3'-phosphorothioate
  modified_base 9: mod_base = OTHER; note = 2'-deoxyguanosine-3'-phosphorothioate
  modified_base 10: mod_base = OTHER; note = 2'-deoxyguanosine-3'-phosphorothioate
  modified_base 11: mod_base = OTHER; note = 2'-deoxyguanosine-3'-phosphorothioate
  modified_base 12: mod_base = OTHER; note = 2'-deoxyadenosine-3'-phosphorothioate
  modified_base 13: mod_base = OTHER; note = 2'-deoxyadenosine-3'-phosphorothioate
  modified_base 14: mod_base = OTHER; note = 2'-deoxyadenosine-3'-phosphorothioate
  modified_base 15: mod_base = OTHER; note = 2'-deoxyguanosine-3'-phosphorothioate
  modified_base 16: mod_base = OTHER; note = 2'-O-methyladenosine-3'-phosphorothioate
  modified_base 17: mod_base = OTHER; note = 2'-O-methyluridine-3'-phosphorothioate
  modified_base 18: mod_base = OTHER; note = 2'-O-methyladenosine-3'-phosphorothioate
  modified_base 19: mod_base = OTHER; note = 2'-O-methyladenosine-3'-phosphorothioate
  modified_base 20: mod_base = OTHER; note = 2'-O-methylcytidine
  misc_feature 1..5: note = RNA
  misc_feature 16..20: note = RNA
  misc_feature 6..15: note = DNA
aaagctatgggaaagataac

SEQ ID NO: 537 - DNA, 20 bp, synthetic construct
  source 1..20: mol_type = other DNA
  modified_base 1: mod_base = OTHER; note = 2'-O-methyladenosine-3'-phosphorothioate
  modified_base 2: mod_base = OTHER; note = 2'-O-methyladenosine-3'-phosphorothioate
  modified_base 3: mod_base = OTHER; note = 2'-O-methyladenosine-3'-phosphorothioate
  modified_base 4: mod_base = OTHER; note = 2'-O-methylguanosine-3'-phosphorothioate
  modified_base 5: mod_base = OTHER; note = 2'-O-methyladenosine-3'-phosphorothioate
  modified_base 6: mod_base = OTHER; note = 2'-deoxythymidine-3'-phosphorothioate
  modified_base 7: mod_base = OTHER; note = 2'-deoxyadenosine-3'-phosphorothioate
  modified_base 8: mod_base = OTHER; note = 2'-deoxyadenosine-3'-phosphorothioate
  modified_base 9: mod_base = OTHER; note = 2'-deoxythymidine-3'-phosphorothioate
  modified_base 10: mod_base = OTHER; note = 2'-deoxyguanosine-3'-phosphorothioate
  modified_base 11: mod_base = OTHER; note = 2'-deoxyadenosine-3'-phosphorothioate
  modified_base 12: mod_base = OTHER; note = 2'-deoxyadenosine-3'-phosphorothioate
  modified_base 13: mod_base = OTHER; note = 2'-deoxyadenosine-3'-phosphorothioate
  modified_base 14: mod_base = OTHER; note = 2'-deoxyadenosine-3'-phosphorothioate
  modified_base 15: mod_base = OTHER; note = 2'-deoxyguanosine-3'-phosphorothioate
  modified_base 16: mod_base = OTHER; note = 2'-O-methylcytidine-3'-phosphorothioate
  modified_base 17: mod_base = OTHER; note = 2'-O-methyluridine-3'-phosphorothioate
  modified_base 18: mod_base = OTHER; note = 2'-O-methyladenosine-3'-phosphorothioate
  modified_base 19: mod_base = OTHER; note = 2'-O-methyluridine-3'-phosphorothioate
  modified_base 20: mod_base = OTHER; note = 2'-O-methylguanosine
  misc_feature 1..5: note = RNA
  misc_feature 16..20: note = RNA
  misc_feature 6..15: note = DNA
aaagataatgaaaagctatg

SEQ ID NO: 538 - DNA, 20 bp, synthetic construct
  source 1..20: mol_type = other DNA
  modified_base 1: mod_base = OTHER; note = 2'-O-methyluridine-3'-phosphorothioate
  modified_base 2: mod_base = OTHER; note = 2'-O-methylguanosine-3'-phosphorothioate
  modified_base 3: mod_base = OTHER; note = 2'-O-methylguanosine-3'-phosphorothioate
  modified_base 4: mod_base = OTHER; note = 2'-O-methyladenosine-3'-phosphorothioate
  modified_base 5: mod_base = OTHER; note = 2'-O-methyluridine-3'-phosphorothioate
  modified_base 6: mod_base = OTHER; note = 5'-methyl-deoxycytidine-3'-phosphorothioate
  modified_base 7: mod_base = OTHER; note = 2'-deoxyadenosine-3'-phosphorothioate
  modified_base 8: mod_base = OTHER; note = 2'-deoxythymidine-3'-phosphorothioate
  modified_base 9: mod_base = OTHER; note = 2'-deoxyadenosine-3'-phosphorothioate
  modified_base 10: mod_base = OTHER; note = 2'-deoxythymidine-3'-phosphorothioate
  modified_base 11: mod_base = OTHER; note = 2'-deoxyguanosine-3'-phosphorothioate
  modified_base 12: mod_base = OTHER; note = 2'-deoxyadenosine-3'-phosphorothioate
  modified_base 13: mod_base = OTHER; note = 2'-deoxyadenosine-3'-phosphorothioate
  modified_base 14: mod_base = OTHER; note = 2'-deoxyadenosine-3'-phosphorothioate
  modified_base 15: mod_base = OTHER; note = 2'-deoxyguanosine-3'-phosphorothioate
  modified_base 16: mod_base = OTHER; note = 2'-O-methyladenosine-3'-phosphorothioate
  modified_base 17: mod_base = OTHER; note = 2'-O-methyluridine-3'-phosphorothioate
  modified_base 18: mod_base = OTHER; note = 2'-O-methyladenosine-3'-phosphorothioate
  modified_base 19: mod_base = OTHER; note = 2'-O-methyladenosine-3'-phosphorothioate
  modified_base 20: mod_base = OTHER; note = 2'-O-methyluridine
  misc_feature 1..5: note = RNA
  misc_feature 16..20: note = RNA
  misc_feature 6..15: note = DNA
tggatcatatgaaagataat

SEQ ID NO: 539 - DNA, 20 bp, synthetic construct
  source 1..20: mol_type = other DNA
  modified_base 1: mod_base = OTHER; note = 2'-O-methyluridine-3'-phosphorothioate
  modified_base 2: mod_base = OTHER; note = 2'-O-methyladenosine-3'-phosphorothioate
  modified_base 3: mod_base = OTHER; note = 2'-O-methyladenosine-3'-phosphorothioate
  modified_base 4: mod_base = OTHER; note = 2'-O-methylcytidine-3'-phosphorothioate
  modified_base 5: mod_base = OTHER; note = 2'-O-methyladenosine-3'-phosphorothioate
  modified_base 6: mod_base = OTHER; note = 2'-deoxythymidine-3'-phosphorothioate
  modified_base 7: mod_base = OTHER; note = 2'-deoxyadenosine-3'-phosphorothioate
  modified_base 8: mod_base = OTHER; note = 2'-deoxythymidine-3'-phosphorothioate
  modified_base 9: mod_base = OTHER; note = 2'-deoxyadenosine-3'-phosphorothioate
  modified_base 10: mod_base = OTHER; note = 5'-methyl-deoxycytidine-3'-phosphorothioate
  modified_base 11: mod_base = OTHER; note = 2'-deoxythymidine-3'-phosphorothioate
  modified_base 12: mod_base = OTHER; note = 2'-deoxyguanosine-3'-phosphorothioate
  modified_base 13: mod_base = OTHER; note = 2'-deoxyguanosine-3'-phosphorothioate
  modified_base 14: mod_base = OTHER; note = 2'-deoxyadenosine-3'-phosphorothioate
  modified_base 15: mod_base = OTHER; note = 2'-deoxythymidine-3'-phosphorothioate
  modified_base 16: mod_base = OTHER; note = 2'-O-methylcytidine-3'-phosphorothioate
  modified_base 17: mod_base = OTHER; note = 2'-O-methyladenosine-3'-phosphorothioate
  modified_base 18: mod_base = OTHER; note = 2'-O-methyluridine-3'-phosphorothioate
  modified_base 19: mod_base = OTHER; note = 2'-O-methyladenosine-3'-phosphorothioate
  modified_base 20: mod_base = OTHER; note = 2'-O-methyluridine
  misc_feature 1..5: note = RNA
  misc_feature 16..20: note = RNA
  misc_feature 6..15: note = DNA
taacatatactggatcatat

SEQ ID NO: 540 - DNA, 20 bp, synthetic construct
  source 1..20: mol_type = other DNA
  modified_base 1: mod_base = OTHER; note = 2'-O-methyladenosine-3'-phosphorothioate
  modified_base 2: mod_base = OTHER; note = 2'-O-methylguanosine-3'-phosphorothioate
  modified_base 3: mod_base = OTHER; note = 2'-O-methylguanosine-3'-phosphorothioate
  modified_base 4: mod_base = OTHER; note = 2'-O-methyladenosine-3'-phosphorothioate
  modified_base 5: mod_base = OTHER; note = 2'-O-methylcytidine-3'-phosphorothioate
  modified_base 6: mod_base = OTHER; note = 2'-deoxyadenosine-3'-phosphorothioate
  modified_base 7: mod_base = OTHER; note = 2'-deoxythymidine-3'-phosphorothioate
  modified_base 8: mod_base = OTHER; note = 2'-deoxyadenosine-3'-phosphorothioate
  modified_base 9: mod_base = OTHER; note = 2'-deoxythymidine-3'-phosphorothioate
  modified_base 10: mod_base = OTHER; note = 2'-deoxythymidine-3'-phosphorothioate
  modified_base 11: mod_base = OTHER; note = 2'-deoxythymidine-3'-phosphorothioate
  modified_base 12: mod_base = OTHER; note = 2'-deoxyadenosine-3'-phosphorothioate
  modified_base 13: mod_base = OTHER; note = 2'-deoxyadenosine-3'-phosphorothioate
  modified_base 14: mod_base = OTHER; note = 5'-methyl-deoxycytidine-3'-phosphorothioate
  modified_base 15: mod_base = OTHER; note = 2'-deoxyadenosine-3'-phosphorothioate
  modified_base 16: mod_base = OTHER; note = 2'-O-methyluridine-3'-phosphorothioate
  modified_base 17: mod_base = OTHER; note = 2'-O-methyladenosine-3'-phosphorothioate
  modified_base 18: mod_base = OTHER; note = 2'-O-methyluridine-3'-phosphorothioate
  modified_base 19: mod_base = OTHER; note = 2'-O-methyladenosine-3'-phosphorothioate
  modified_base 20: mod_base = OTHER; note = 2'-O-methylcytidine
  misc_feature 1..5: note = RNA
  misc_feature 16..20: note = RNA
  misc_feature 6..15: note = DNA
aggacatatttaacatatac

SEQ ID NO: 541 - DNA, 20 bp, synthetic construct
  source 1..20: mol_type = other DNA
  modified_base 1: mod_base = OTHER; note = 2'-O-methyladenosine-3'-phosphorothioate
  modified_base 2: mod_base = OTHER; note = 2'-O-methyladenosine-3'-phosphorothioate
  modified_base 3: mod_base = OTHER; note = 2'-O-methyluridine-3'-phosphorothioate
  modified_base 4: mod_base = OTHER; note = 2'-O-methylguanosine-3'-phosphorothioate
  modified_base 5: mod_base = OTHER; note = 2'-O-methyluridine-3'-phosphorothioate
  modified_base 6: mod_base = OTHER; note = 2'-deoxyadenosine-3'-phosphorothioate
  modified_base 7: mod_base = OTHER; note = 2'-deoxythymidine-3'-phosphorothioate
  modified_base 8: mod_base = OTHER; note = 2'-deoxyadenosine-3'-phosphorothioate
  modified_base 9: mod_base = OTHER; note = 2'-deoxythymidine-3'-phosphorothioate
  modified_base 10: mod_base = OTHER; note = 2'-deoxyguanosine-3'-phosphorothioate
  modified_base 11: mod_base = OTHER; note = 2'-deoxythymidine-3'-phosphorothioate
  modified_base 12: mod_base = OTHER; note = 2'-deoxyadenosine-3'-phosphorothioate
  modified_base 13: mod_base = OTHER; note = 2'-deoxyguanosine-3'-phosphorothioate
  modified_base 14: mod_base = OTHER; note = 2'-deoxyguanosine-3'-phosphorothioate
  modified_base 15: mod_base = OTHER; note = 2'-deoxyadenosine-3'-phosphorothioate
  modified_base 16: mod_base = OTHER; note = 2'-O-methylcytidine-3'-phosphorothioate
  modified_base 17: mod_base = OTHER; note = 2'-O-methyladenosine-3'-phosphorothioate
  modified_base 18: mod_base = OTHER; note = 2'-O-methyluridine-3'-phosphorothioate
  modified_base 19: mod_base = OTHER; note = 2'-O-methyladenosine-3'-phosphorothioate
  modified_base 20: mod_base = OTHER; note = 2'-O-methyluridine
  misc_feature 1..5: note = RNA
  misc_feature 16..20: note = RNA
  misc_feature 6..15: note = DNA
aatgtatatgtaggacatat

SEQ ID NO: 542 - DNA, 20 bp, synthetic construct
  source 1..20: mol_type = other DNA
  modified_base 1: mod_base = OTHER; note = 2'-O-methylguanosine-3'-phosphorothioate
  modified_base 2: mod_base = OTHER; note = 2'-O-methyluridine-3'-phosphorothioate
  modified_base 3: mod_base = OTHER; note = 2'-O-methylguanosine-3'-phosphorothioate
  modified_base 4: mod_base = OTHER; note = 2'-O-methylguanosine-3'-phosphorothioate
  modified_base 5: mod_base = OTHER; note = 2'-O-methyluridine-3'-phosphorothioate
  modified_base 6: mod_base = OTHER; note = 2'-deoxythymidine-3'-phosphorothioate
  modified_base 7: mod_base = OTHER; note = 2'-deoxyguanosine-3'-phosphorothioate
  modified_base 8: mod_base = OTHER; note = 2'-deoxythymidine-3'-phosphorothioate
  modified_base 9: mod_base = OTHER; note = 5'-methyl-deoxycytidine-3'-phosphorothioate
  modified_base 10: mod_base = OTHER; note = 2'-deoxythymidine-3'-phosphorothioate
  modified_base 11: mod_base = OTHER; note = 2'-deoxyadenosine-3'-phosphorothioate
  modified_base 12: mod_base = OTHER; note = 2'-deoxyadenosine-3'-phosphorothioate
  modified_base 13: mod_base = OTHER; note = 2'-deoxyadenosine-3'-phosphorothioate
  modified_base 14: mod_base = OTHER; note = 2'-deoxythymidine-3'-phosphorothioate
  modified_base 15: mod_base = OTHER; note = 2'-deoxyguanosine-3'-phosphorothioate
  modified_base 16: mod_base = OTHER; note = 2'-O-methyluridine-3'-phosphorothioate
  modified_base 17: mod_base = OTHER; note = 2'-O-methyladenosine-3'-phosphorothioate
  modified_base 18: mod_base = OTHER; note = 2'-O-methyluridine-3'-phosphorothioate
  modified_base 19: mod_base = OTHER; note = 2'-O-methyladenosine-3'-phosphorothioate
  modified_base 20: mod_base = OTHER; note = 2'-O-methyluridine
  misc_feature 1..5: note = RNA
  misc_feature 16..20: note = RNA
  misc_feature 6..15: note = DNA
gtggttgtctaaatgtatat

SEQ ID NO: 543 - DNA, 20 bp, synthetic construct
  source 1..20: mol_type = other DNA
  modified_base 1: mod_base = OTHER; note = 2'-O-methylcytidine-3'-phosphorothioate
  modified_base 2: mod_base = OTHER; note = 2'-O-methyluridine-3'-phosphorothioate
  modified_base 3: mod_base = OTHER; note = 2'-O-methyluridine-3'-phosphorothioate
  modified_base 4: mod_base = OTHER; note = 2'-O-methyladenosine-3'-phosphorothioate
  modified_base 5: mod_base = OTHER; note = 2'-O-methyladenosine-3'-phosphorothioate
  modified_base 6: mod_base = OTHER; note = 5'-methyl-deoxycytidine-3'-phosphorothioate
  modified_base 7: mod_base = OTHER; note = 2'-deoxyadenosine-3'-phosphorothioate
  modified_base 8: mod_base = OTHER; note = 2'-deoxyadenosine-3'-phosphorothioate
  modified_base 9: mod_base = OTHER; note = 2'-deoxyadenosine-3'-phosphorothioate
  modified_base 10: mod_base = OTHER; note = 2'-deoxythymidine-3'-phosphorothioate
  modified_base 11: mod_base = OTHER; note = 2'-deoxyguanosine-3'-phosphorothioate
  modified_base 12: mod_base = OTHER; note = 2'-deoxyguanosine-3'-phosphorothioate
  modified_base 13: mod_base = OTHER; note = 2'-deoxythymidine-3'-phosphorothioate
  modified_base 14: mod_base = OTHER; note = 2'-deoxyguanosine-3'-phosphorothioate
  modified_base 15: mod_base = OTHER; note = 2'-deoxyguanosine-3'-phosphorothioate
  modified_base 16: mod_base = OTHER; note = 2'-O-methyluridine-3'-phosphorothioate
  modified_base 17: mod_base = OTHER; note = 2'-O-methyluridine-3'-phosphorothioate
  modified_base 18: mod_base = OTHER; note = 2'-O-methylguanosine-3'-phosphorothioate
  modified_base 19: mod_base = OTHER; note = 2'-O-methyluridine-3'-phosphorothioate
  modified_base 20: mod_base = OTHER; note = 2'-O-methylcytidine
  misc_feature 1..5: note = RNA
  misc_feature 16..20: note = RNA
  misc_feature 6..15: note = DNA
cttaacaaatggtggttgtc

SEQ ID NO: 544 - DNA, 20 bp, synthetic construct
  source 1..20: mol_type = other DNA
  modified_base 1: mod_base = OTHER; note = 2'-O-methyluridine-3'-phosphorothioate
  modified_base 2: mod_base = OTHER; note = 2'-O-methyladenosine-3'-phosphorothioate
  modified_base 3: mod_base = OTHER; note = 2'-O-methylguanosine-3'-phosphorothioate
  modified_base 4: mod_base = OTHER; note = 2'-O-methyladenosine-3'-phosphorothioate
  modified_base 5: mod_base = OTHER; note = 2'-O-methylguanosine-3'-phosphorothioate
  modified_base 6: mod_base = OTHER; note = 5'-methyl-deoxycytidine-3'-phosphorothioate
  modified_base 7: mod_base = OTHER; note = 2'-deoxyadenosine-3'-phosphorothioate
  modified_base 8: mod_base = OTHER; note = 2'-deoxyadenosine-3'-phosphorothioate
  modified_base 9: mod_base = OTHER; note = 2'-deoxyadenosine-3'-phosphorothioate
  modified_base 10: mod_base = OTHER; note = 2'-deoxythymidine-3'-phosphorothioate
  modified_base 11: mod_base = OTHER; note = 2'-deoxyadenosine-3'-phosphorothioate
  modified_base 12: mod_base = OTHER; note = 5'-methyl-deoxycytidine-3'-phosphorothioate
  modified_base 13: mod_base = OTHER; note = 2'-deoxythymidine-3'-phosphorothioate
  modified_base 14: mod_base = OTHER; note = 2'-deoxythymidine-3'-phosphorothioate
  modified_base 15: mod_base = OTHER; note = 2'-deoxyadenosine-3'-phosphorothioate
  modified_base 16: mod_base = OTHER; note = 2'-O-methyladenosine-3'-phosphorothioate
  modified_base 17: mod_base = OTHER; note = 2'-O-methylcytidine-3'-phosphorothioate
  modified_base 18: mod_base = OTHER; note = 2'-O-methyladenosine-3'-phosphorothioate
  modified_base 19: mod_base = OTHER; note = 2'-O-methyladenosine-3'-phosphorothioate
  modified_base 20: mod_base = OTHER; note = 2'-O-methyladenosine
  misc_feature 1..5: note = RNA
  misc_feature 16..20: note = RNA
  misc_feature 6..15: note = DNA
tagagcaaatacttaacaaa

SEQ ID NO: 545 - DNA, 20 bp, synthetic construct
  source 1..20: mol_type = other DNA
  modified_base 1: mod_base = OTHER; note = 2'-O-methyladenosine-3'-phosphorothioate
  modified_base 2: mod_base = OTHER; note = 2'-O-methyladenosine-3'-phosphorothioate
  modified_base 3: mod_base = OTHER; note = 2'-O-methyladenosine-3'-phosphorothioate
  modified_base 4: mod_base = OTHER; note = 2'-O-methylcytidine-3'-phosphorothioate
  modified_base 5: mod_base = OTHER; note = 2'-O-methyluridine-3'-phosphorothioate
  modified_base 6: mod_base = OTHER; note = 5'-methyl-deoxycytidine-3'-phosphorothioate
  modified_base 7: mod_base = OTHER; note = 2'-deoxythymidine-3'-phosphorothioate
  modified_base 8: mod_base = OTHER; note = 2'-deoxyguanosine-3'-phosphorothioate
  modified_base 9: mod_base = OTHER; note = 2'-deoxythymidine-3'-phosphorothioate
  modified_base 10: mod_base = OTHER; note = 5'-methyl-deoxycytidine-3'-phosphorothioate
  modified_base 11: mod_base = OTHER; note = 5'-methyl-deoxycytidine-3'-phosphorothioate
  modified_base 12: mod_base = OTHER; note = 2'-deoxythymidine-3'-phosphorothioate
  modified_base 13: mod_base = OTHER; note = 2'-deoxyadenosine-3'-phosphorothioate
  modified_base 14: mod_base = OTHER; note = 2'-deoxyguanosine-3'-phosphorothioate
  modified_base 15: mod_base = OTHER; note = 2'-deoxyadenosine-3'-phosphorothioate
  modified_base 16: mod_base = OTHER; note = 2'-O-methylguanosine-3'-phosphorothioate
  modified_base 17: mod_base = OTHER; note = 2'-O-methylcytidine-3'-phosphorothioate
  modified_base 18: mod_base = OTHER; note = 2'-O-methyladenosine-3'-phosphorothioate
  modified_base 19: mod_base = OTHER; note = 2'-O-methyladenosine-3'-phosphorothioate
  modified_base 20: mod_base = OTHER; note = 2'-O-methyladenosine
  misc_feature 1..5: note = RNA
  misc_feature 16..20: note = RNA
  misc_feature 6..15: note = DNA
aaactctgtcctagagcaaa

SEQ ID NO: 546 - DNA, 20 bp, synthetic construct
  source 1..20: mol_type = other DNA
  modified_base 1: mod_base = OTHER; note = 2'-O-methyladenosine-3'-phosphorothioate
  modified_base 2: mod_base = OTHER; note = 2'-O-methyluridine-3'-phosphorothioate
  modified_base 3: mod_base = OTHER; note = 2'-O-methyladenosine-3'-phosphorothioate
  modified_base 4: mod_base = OTHER; note = 2'-O-methyladenosine-3'-phosphorothioate
  modified_base 5: mod_base = OTHER; note = 2'-O-methyladenosine-3'-phosphorothioate
  modified_base 6: mod_base = OTHER; note = 5'-methyl-deoxycytidine-3'-phosphorothioate
  modified_base 7: mod_base = OTHER; note = 2'-deoxyadenosine-3'-phosphorothioate
  modified_base 8: mod_base = OTHER; note = 2'-deoxyadenosine-3'-phosphorothioate
  modified_base 9: mod_base = OTHER; note = 2'-deoxyadenosine-3'-phosphorothioate
  modified_base 10: mod_base = OTHER; note = 2'-deoxythymidine-3'-phosphorothioate
  modified_base 11: mod_base = OTHER; note = 5'-methyl-deoxycytidine-3'-phosphorothioate
  modified_base 12: mod_base = OTHER; note = 5'-methyl-deoxycytidine-3'-phosphorothioate
  modified_base 13: mod_base = OTHER; note = 2'-deoxyadenosine-3'-phosphorothioate
  modified_base 14: mod_base = OTHER; note = 2'-deoxyadenosine-3'-phosphorothioate
  modified_base 15: mod_base = OTHER; note = 2'-deoxyadenosine-3'-phosphorothioate
  modified_base 16: mod_base = OTHER; note = 2'-O-methylcytidine-3'-phosphorothioate
  modified_base 17: mod_base = OTHER; note = 2'-O-methyluridine-3'-phosphorothioate
  modified_base 18: mod_base = OTHER; note = 2'-O-methylcytidine-3'-phosphorothioate
  modified_base 19: mod_base = OTHER; note = 2'-O-methyluridine-3'-phosphorothioate
  modified_base 20: mod_base = OTHER; note = 2'-O-methylguanosine
  misc_feature 1..5: note = RNA
  misc_feature 16..20: note = RNA
  misc_feature 6..15: note = DNA
ataaacaaatccaaactctg

SEQ ID NO: 547 - DNA, 20 bp, synthetic construct
  source 1..20: mol_type = other DNA
  modified_base 1: mod_base = OTHER; note = 2'-O-methyluridine-3'-phosphorothioate
  modified_base 2: mod_base = OTHER; note = 2'-O-methyluridine-3'-phosphorothioate
  modified_base 3: mod_base = OTHER; note = 2'-O-methyluridine-3'-phosphorothioate
  modified_base 4: mod_base = OTHER; note = 2'-O-methylguanosine-3'-phosphorothioate
  modified_base 5: mod_base = OTHER; note = 2'-O-methyladenosine-3'-phosphorothioate
  modified_base 6: mod_base = OTHER; note = 2'-deoxyguanosine-3'-phosphorothioate
  modified_base 7: mod_base = OTHER; note = 5'-methyl-deoxycytidine-3'-phosphorothioate
  modified_base 8: mod_base = OTHER; note = 2'-deoxyadenosine-3'-phosphorothioate
  modified_base 9: mod_base = OTHER; note = 2'-deoxyadenosine-3'-phosphorothioate
  modified_base 10: mod_base = OTHER; note = 2'-deoxyadenosine-3'-phosphorothioate
  modified_base 11: mod_base = OTHER; note = 5'-methyl-deoxycytidine-3'-phosphorothioate
  modified_base 12: mod_base = OTHER; note = 2'-deoxyadenosine-3'-phosphorothioate
  modified_base 13: mod_base = OTHER; note = 2'-deoxythymidine-3'-phosphorothioate
  modified_base 14: mod_base = OTHER; note = 2'-deoxyadenosine-3'-phosphorothioate
  modified_base 15: mod_base = OTHER; note = 2'-deoxyadenosine-3'-phosphorothioate
  modified_base 16: mod_base = OTHER; note = 2'-O-methyladenosine-3'-phosphorothioate
  modified_base 17: mod_base = OTHER; note = 2'-O-methylcytidine-3'-phosphorothioate
  modified_base 18: mod_base = OTHER; note = 2'-O-methyladenosine-3'-phosphorothioate
  modified_base 19: mod_base = OTHER; note = 2'-O-methyladenosine-3'-phosphorothioate
  modified_base 20: mod_base = OTHER; note = 2'-O-methyladenosine
  misc_feature 1..5: note = RNA
  misc_feature 16..20: note = RNA
  misc_feature 6..15: note = DNA
tttgagcaaacataaacaaa

SEQ ID NO: 548 - DNA, 20 bp, synthetic construct
  source 1..20: mol_type = other DNA
  modified_base 1: mod_base = OTHER; note = 2'-O-methyluridine-3'-phosphorothioate
  modified_base 2: mod_base = OTHER; note = 2'-O-methylguanosine-3'-phosphorothioate
  modified_base 3: mod_base = OTHER; note = 2'-O-methylguanosine-3'-phosphorothioate
  modified_base 4: mod_base = OTHER; note = 2'-O-methylguanosine-3'-phosphorothioate
  modified_base 5: mod_base = OTHER; note = 2'-O-methyluridine-3'-phosphorothioate
  modified_base 6: mod_base = OTHER; note = 5'-methyl-deoxycytidine-3'-phosphorothioate
  modified_base 7: mod_base = OTHER; note = 2'-deoxythymidine-3'-phosphorothioate
  modified_base 8: mod_base = OTHER; note = 5'-methyl-deoxycytidine-3'-phosphorothioate
  modified_base 9: mod_base = OTHER; note = 5'-methyl-deoxycytidine-3'-phosphorothioate
  modified_base 10: mod_base = OTHER; note = 2'-deoxythymidine-3'-phosphorothioate
  modified_base 11: mod_base = OTHER; note = 2'-deoxythymidine-3'-phosphorothioate
  modified_base 12: mod_base = OTHER; note = 2'-deoxythymidine-3'-phosphorothioate
  modified_base 13: mod_base = OTHER; note = 2'-deoxythymidine-3'-phosphorothioate
  modified_base 14: mod_base = OTHER; note = 2'-deoxyguanosine-3'-phosphorothioate
  modified_base 15: mod_base = OTHER; note = 2'-deoxyadenosine-3'-phosphorothioate
  modified_base 16: mod_base = OTHER; note = 2'-O-methylguanosine-3'-phosphorothioate
  modified_base 17: mod_base = OTHER; note = 2'-O-methylcytidine-3'-phosphorothioate
  modified_base 18: mod_base = OTHER; note = 2'-O-methyladenosine-3'-phosphorothioate
  modified_base 19: mod_base = OTHER; note = 2'-O-methyladenosine-3'-phosphorothioate
  modified_base 20: mod_base = OTHER; note = 2'-O-methyladenosine
  misc_feature 1..5: note = RNA
  misc_feature 16..20: note = RNA
  misc_feature 6..15: note = DNA
tgggtctccttttgagcaaa

SEQ ID NO: 549 - DNA, 20 bp, synthetic construct
  source 1..20: mol_type = other DNA
  modified_base 1: mod_base = OTHER; note = 2'-O-methylcytidine-3'-phosphorothioate
  modified_base 2: mod_base = OTHER; note = 2'-O-methyluridine-3'-phosphorothioate
  modified_base 3: mod_base = OTHER; note = 2'-O-methylguanosine-3'-phosphorothioate
  modified_base 4: mod_base = OTHER; note = 2'-O-methylguanosine-3'-phosphorothioate
  modified_base 5: mod_base = OTHER; note = 2'-O-methyladenosine-3'-phosphorothioate
  modified_base 6: mod_base = OTHER; note = 2'-deoxyguanosine-3'-phosphorothioate
  modified_base 7: mod_base = OTHER; note = 2'-deoxyadenosine-3'-phosphorothioate
  modified_base 8: mod_base = OTHER; note = 2'-deoxyguanosine-3'-phosphorothioate
  modified_base 9: mod_base = OTHER; note = 5'-methyl-deoxycytidine-3'-phosphorothioate
  modified_base 10: mod_base = OTHER; note = 5'-methyl-deoxycytidine-3'-phosphorothioate
  modified_base 11: mod_base = OTHER; note = 5'-methyl-deoxycytidine-3'-phosphorothioate
  modified_base 12: mod_base = OTHER; note = 2'-deoxyadenosine-3'-phosphorothioate
  modified_base 13: mod_base = OTHER; note = 2'-deoxythymidine-3'-phosphorothioate
  modified_base 14: mod_base = OTHER; note = 2'-deoxyguanosine-3'-phosphorothioate
  modified_base 15: mod_base = OTHER; note = 2'-deoxyguanosine-3'-phosphorothioate
  modified_base 16: mod_base = OTHER; note = 2'-O-methylguanosine-3'-phosphorothioate
  modified_base 17: mod_base = OTHER; note = 2'-O-methyluridine-3'-phosphorothioate
  modified_base 18: mod_base = OTHER; note = 2'-O-methylcytidine-3'-phosphorothioate
  modified_base 19: mod_base = OTHER; note = 2'-O-methyluridine-3'-phosphorothioate
  modified_base 20: mod_base = OTHER; note = 2'-O-methylcytidine
  misc_feature 1..5: note = RNA
  misc_feature 16..20: note = RNA
  misc_feature 6..15: note = DNA
ctggagagcccatgggtctc

SEQ ID NO: 550 - DNA, 20 bp, synthetic construct
  source 1..20: mol_type = other DNA
  modified_base 1: mod_base = OTHER; note = 2'-O-methyladenosine-3'-phosphorothioate
  modified_base 2: mod_base = OTHER; note = 2'-O-methylcytidine-3'-phosphorothioate
  modified_base 3: mod_base = OTHER; note = 2'-O-methyluridine-3'-phosphorothioate
  modified_base 4: mod_base = OTHER; note = 2'-O-methylcytidine-3'-phosphorothioate
  modified_base 5: mod_base = OTHER; note = 2'-O-methyladenosine-3'-phosphorothioate
  modified_base 6: mod_base = OTHER; note = 2'-deoxyguanosine-3'-phosphorothioate
  modified_base 7: mod_base = OTHER; note = 2'-deoxythymidine-3'-phosphorothioate
  modified_base 8: mod_base = OTHER; note = 2'-deoxyguanosine-3'-phosphorothioate
  modified_base 9: mod_base = OTHER; note = 5'-methyl-deoxycytidine-3'-phosphorothioate
  modified_base 10: mod_base = OTHER; note = 2'-deoxyadenosine-3'-phosphorothioate
  modified_base 11: mod_base = OTHER; note = 5'-methyl-deoxycytidine-3'-phosphorothioate
  modified_base 12: mod_base = OTHER; note = 5'-methyl-deoxycytidine-3'-phosphorothioate
  modified_base 13: mod_base = OTHER; note = 5'-methyl-deoxycytidine-3'-phosphorothioate
  modified_base 14: mod_base = OTHER; note = 2'-deoxythymidine-3'-phosphorothioate
  modified_base 15: mod_base = OTHER; note = 2'-deoxyguanosine-3'-phosphorothioate
  modified_base 16: mod_base = OTHER; note = 2'-O-methylguanosine-3'-phosphorothioate
  modified_base 17: mod_base = OTHER; note = 2'-O-methyladenosine-3'-phosphorothioate
  modified_base 18: mod_base = OTHER; note = 2'-O-methylguanosine-3'-phosphorothioate
  modified_base 19: mod_base = OTHER; note = 2'-O-methyladenosine-3'-phosphorothioate
  modified_base 20: mod_base = OTHER; note = 2'-O-methylguanosine
  misc_feature 1..5: note = RNA
  misc_feature 16..20: note = RNA
  misc_feature 6..15: note = DNA
actcagtgcaccctggagag

SEQ ID NO: 551 - DNA, 20 bp, synthetic construct
  source 1..20: mol_type = other DNA
  modified_base 1: mod_base = OTHER; note = 2'-O-methylguanosine-3'-phosphorothioate
  modified_base 2: mod_base = OTHER; note = 2'-O-methylguanosine-3'-phosphorothioate
  modified_base 3: mod_base = OTHER; note = 2'-O-methyladenosine-3'-phosphorothioate
  modified_base 4: mod_base = OTHER; note = 2'-O-methylcytidine-3'-phosphorothioate
  modified_base 5: mod_base = OTHER; note = 2'-O-methyluridine-3'-phosphorothioate
  modified_base 6: mod_base = OTHER; note = 2'-deoxyadenosine-3'-phosphorothioate
  modified_base 7: mod_base = OTHER; note = 2'-deoxyguanosine-3'-phosphorothioate
  modified_base 8: mod_base = OTHER; note = 2'-deoxyadenosine-3'-phosphorothioate
  modified_base 9: mod_base = OTHER; note = 2'-deoxythymidine-3'-phosphorothioate
  modified_base 10: mod_base = OTHER; note = 2'-deoxythymidine-3'-phosphorothioate
  modified_base 11: mod_base = OTHER; note = 2'-deoxyguanosine-3'-phosphorothioate
  modified_base 12: mod_base = OTHER; note = 2'-deoxyadenosine-3'-phosphorothioate
  modified_base 13: mod_base = OTHER; note = 5'-methyl-deoxycytidine-3'-phosphorothioate
  modified_base 14: mod_base = OTHER; note = 2'-deoxythymidine-3'-phosphorothioate
  modified_base 15: mod_base = OTHER; note = 5'-methyl-deoxycytidine-3'-phosphorothioate
  modified_base 16: mod_base = OTHER; note = 2'-O-methyladenosine-3'-phosphorothioate
  modified_base 17: mod_base = OTHER; note = 2'-O-methylguanosine-3'-phosphorothioate
  modified_base 18: mod_base = OTHER; note = 2'-O-methyluridine-3'-phosphorothioate
  modified_base 19: mod_base = OTHER; note = 2'-O-methylguanosine-3'-phosphorothioate
  modified_base 20: mod_base = OTHER; note = 2'-O-methylcytidine
  misc_feature 1..5: note = RNA
  misc_feature 16..20: note = RNA
  misc_feature 6..15: note = DNA
ggactagattgactcagtgc

SEQ ID NO: 552 - DNA, 20 bp, synthetic construct
  source 1..20: mol_type = other DNA
  modified_base 1: mod_base = OTHER; note = 2'-O-methyladenosine-3'-phosphorothioate
  modified_base 2: mod_base = OTHER; note = 2'-O-methyluridine-3'-phosphorothioate
  modified_base 3: mod_base = OTHER; note = 2'-O-methyluridine-3'-phosphorothioate
  modified_base 4: mod_base = OTHER; note = 2'-O-methylguanosine-3'-phosphorothioate
  modified_base 5: mod_base = OTHER; note = 2'-O-methylcytidine-3'-phosphorothioate
  modified_base 6: mod_base = OTHER; note = 2'-deoxythymidine-3'-phosphorothioate
  modified_base 7: mod_base = OTHER; note = 2'-deoxythymidine-3'-phosphorothioate
  modified_base 8: mod_base = OTHER; note = 2'-deoxythymidine-3'-phosphorothioate
  modified_base 9: mod_base = OTHER; note = 2'-deoxythymidine-3'-phosphorothioate
  modified_base 10: mod_base = OTHER; note = 2'-deoxythymidine-3'-phosphorothioate
  modified_base 11: mod_base = OTHER; note = 2'-deoxyadenosine-3'-phosphorothioate
  modified_base 12: mod_base = OTHER; note = 2'-deoxyguanosine-3'-phosphorothioate
  modified_base 13: mod_base = OTHER; note = 2'-deoxyguanosine-3'-phosphorothioate
  modified_base 14: mod_base = OTHER; note = 2'-deoxyadenosine-3'-phosphorothioate
  modified_base 15: mod_base = OTHER; note = 5'-methyl-deoxycytidine-3'-phosphorothioate
  modified_base 16: mod_base = OTHER; note = 2'-O-methyluridine-3'-phosphorothioate
  modified_base 17: mod_base = OTHER; note = 2'-O-methyladenosine-3'-phosphorothioate
  modified_base 18: mod_base = OTHER; note = 2'-O-methylguanosine-3'-phosphorothioate
  modified_base 19: mod_base = OTHER; note = 2'-O-methyladenosine-3'-phosphorothioate
  modified_base 20: mod_base = OTHER; note = 2'-O-methyluridine
  misc_feature 1..5: note = RNA
  misc_feature 16..20: note = RNA
  misc_feature 6..15: note = DNA
attgctttttaggactagat

SEQ ID NO: 553 - DNA, 20 bp, synthetic construct
  source 1..20: mol_type = other DNA
  modified_base 1: mod_base = OTHER; note = 2'-O-methyladenosine-3'-phosphorothioate
  modified_base 2: mod_base = OTHER; note = 2'-O-methyladenosine-3'-phosphorothioate
  modified_base 3: mod_base = OTHER; note = 2'-O-methyluridine-3'-phosphorothioate
  modified_base 4: mod_base = OTHER; note = 2'-O-methyladenosine-3'-phosphorothioate
  modified_base 5: mod_base = OTHER; note = 2'-O-methyladenosine-3'-phosphorothioate
  modified_base 6: mod_base = OTHER; note = 2'-deoxythymidine-3'-phosphorothioate
  modified_base 7: mod_base = OTHER; note = 2'-deoxyadenosine-3'-phosphorothioate
  modified_base 8: mod_base = OTHER; note = 2'-deoxyadenosine-3'-phosphorothioate
  modified_base 9: mod_base = OTHER; note = 2'-deoxyguanosine-3'-phosphorothioate
  modified_base 10: mod_base = OTHER; note = 2'-deoxyadenosine-3'-phosphorothioate
  modified_base 11: mod_base = OTHER; note = 2'-deoxythymidine-3'-phosphorothioate
  modified_base 12: mod_base = OTHER; note = 2'-deoxythymidine-3'-phosphorothioate
  modified_base 13: mod_base = OTHER; note = 2'-deoxyguanosine-3'-phosphorothioate
  modified_base 14: mod_base = OTHER; note = 5'-methyl-deoxycytidine-3'-phosphorothioate
  modified_base 15: mod_base = OTHER; note = 2'-deoxythymidine-3'-phosphorothioate
  modified_base 16: mod_base = OTHER; note = 2'-O-methyluridine-3'-phosphorothioate
  modified_base 17: mod_base = OTHER; note = 2'-O-methyluridine-3'-phosphorothioate
  modified_base 18: mod_base = OTHER; note = 2'-O-methyluridine-3'-phosphorothioate
  modified_base 19: mod_base = OTHER; note = 2'-O-methyluridine-3'-phosphorothioate
  modified_base 20: mod_base = OTHER; note = 2'-O-methyladenosine
  misc_feature 1..5: note = RNA
  misc_feature 16..20: note = RNA
  misc_feature 6..15: note = DNA
aataataagattgcttttta

SEQ ID NO: 554 - DNA, 20 bp, synthetic construct
  source 1..20: mol_type = other DNA
  modified_base 1: mod_base = OTHER; note = 2'-O-methylcytidine-3'-phosphorothioate
  modified_base 2: mod_base = OTHER; note = 2'-O-methyladenosine-3'-phosphorothioate
  modified_base 3: mod_base = OTHER; note = 2'-O-methyluridine-3'-phosphorothioate
  modified_base 4: mod_base = OTHER; note = 2'-O-methyladenosine-3'-phosphorothioate
  modified_base 5: mod_base = OTHER; note = 2'-O-methylcytidine-3'-phosphorothioate
  modified_base 6: mod_base = OTHER; note = 2'-deoxyadenosine-3'-phosphorothioate
  modified_base 7: mod_base = OTHER; note = 2'-deoxyguanosine-3'-phosphorothioate
  modified_base 8: mod_base = OTHER; note = 2'-deoxyadenosine-3'-phosphorothioate
  modified_base 9: mod_base = OTHER; note = 2'-deoxyguanosine-3'-phosphorothioate
  modified_base 10: mod_base = OTHER; note = 2'-deoxythymidine-3'-phosphorothioate
  modified_base 11: mod_base = OTHER; note = 2'-deoxythymidine-3'-phosphorothioate
  modified_base 12: mod_base = OTHER; note = 2'-deoxyadenosine-3'-phosphorothioate
  modified_base 13: mod_base = OTHER; note = 2'-deoxyadenosine-3'-phosphorothioate
  modified_base 14: mod_base = OTHER; note = 2'-deoxythymidine-3'-phosphorothioate
  modified_base 15: mod_base = OTHER; note = 2'-deoxyadenosine-3'-phosphorothioate
  modified_base 16: mod_base = OTHER; note = 2'-O-methyladenosine-3'-phosphorothioate
  modified_base 17: mod_base = OTHER; note = 2'-O-methyluridine-3'-phosphorothioate
  modified_base 18: mod_base = OTHER; note = 2'-O-methyladenosine-3'-phosphorothioate
  modified_base 19: mod_base = OTHER; note = 2'-O-methyladenosine-3'-phosphorothioate
  modified_base 20: mod_base = OTHER; note = 2'-O-methylguanosine
  misc_feature 1..5: note = RNA
  misc_feature 16..20: note = RNA
  misc_feature 6..15: note = DNA
catacagagttaataataag

SEQ ID NO: 555 - DNA, 20 bp, synthetic construct
  source 1..20: mol_type = other DNA
  modified_base 1: mod_base = OTHER; note = 2'-O-methyladenosine-3'-phosphorothioate
  modified_base 2: mod_base = OTHER; note = 2'-O-methylcytidine-3'-phosphorothioate
  modified_base 3: mod_base = OTHER; note = 2'-O-methyladenosine-3'-phosphorothioate
  modified_base 4: mod_base = OTHER; note = 2'-O-methyluridine-3'-phosphorothioate
  modified_base 5: mod_base = OTHER; note = 2'-O-methylguanosine-3'-phosphorothioate
  modified_base 6: mod_base = OTHER; note = 2'-deoxyadenosine-3'-phosphorothioate
  modified_base 7: mod_base = OTHER; note = 2'-deoxythymidine-3'-phosphorothioate
  modified_base 8: mod_base = OTHER; note = 2'-deoxythymidine-3'-phosphorothioate
  modified_base 9: mod_base = OTHER; note = 5'-methyl-deoxycytidine-3'-phosphorothioate
  modified_base 10: mod_base = OTHER; note = 2'-deoxythymidine-3'-phosphorothioate
  modified_base 11: mod_base = OTHER; note = 2'-deoxyguanosine-3'-phosphorothioate
  modified_base 12: mod_base = OTHER; note = 2'-deoxythymidine-3'-phosphorothioate
  modified_base 13: mod_base = OTHER; note = 5'-methyl-deoxycytidine-3'-phosphorothioate
  modified_base 14: mod_base = OTHER; note = 2'-deoxyadenosine-3'-phosphorothioate
  modified_base 15: mod_base = OTHER; note = 2'-deoxythymidine-3'-phosphorothioate
  modified_base 16: mod_base = OTHER; note = 2'-O-methyladenosine-3'-phosphorothioate
  modified_base 17: mod_base = OTHER; note = 2'-O-methylcytidine-3'-phosphorothioate
  modified_base 18: mod_base = OTHER; note = 2'-O-methyladenosine-3'-phosphorothioate
  modified_base 19: mod_base = OTHER; note = 2'-O-methylguanosine-3'-phosphorothioate
  modified_base 20: mod_base = OTHER; note = 2'-O-methyladenosine
  misc_feature 1..5: note = RNA
  misc_feature 16..20: note = RNA
  misc_feature 6..15: note = DNA
acatgattctgtcatacaga

SEQ ID NO: 556 - DNA, 20 bp, synthetic construct
  source 1..20: mol_type = other DNA
  modified_base 1: mod_base = OTHER; note = 2'-O-methyladenosine-3'-phosphorothioate
  modified_base 2: mod_base = OTHER; note = 2'-O-methyladenosine-3'-phosphorothioate
  modified_base 3: mod_base = OTHER; note = 2'-O-methyladenosine-3'-phosphorothioate
  modified_base 4: mod_base = OTHER; note = 2'-O-methyladenosine-3'-phosphorothioate
  modified_base 5: mod_base = OTHER; note = 2'-O-methylguanosine-3'-phosphorothioate
  modified_base 6: mod_base = OTHER; note = 2'-deoxythymidine-3'-phosphorothioate
  modified_base 7: mod_base = OTHER; note = 2'-deoxythymidine-3'-phosphorothioate
  modified_base 8: mod_base = OTHER; note = 5'-methyl-deoxycytidine-3'-phosphorothioate
  modified_base 9: mod_base = OTHER; note = 5'-methyl-deoxycytidine-3'-phosphorothioate
  modified_base 10: mod_base = OTHER; note = 2'-deoxyadenosine-3'-phosphorothioate
  modified_base 11: mod_base = OTHER; note = 2'-deoxyguanosine-3'-phosphorothioate
  modified_base 12: mod_base = OTHER; note = 2'-deoxyadenosine-3'-phosphorothioate
  modified_base 13: mod_base = OTHER; note = 5'-methyl-deoxycytidine-3'-phosphorothioate
  modified_base 14: mod_base = OTHER; note = 2'-deoxyadenosine-3'-phosphorothioate
  modified_base 15: mod_base = OTHER; note = 2'-deoxythymidine-3'-phosphorothioate
  modified_base 16: mod_base = OTHER; note = 2'-O-methylguanosine-3'-phosphorothioate
  modified_base 17: mod_base = OTHER; note = 2'-O-methyladenosine-3'-phosphorothioate
  modified_base 18: mod_base = OTHER; note = 2'-O-methyluridine-3'-phosphorothioate
  modified_base 19: mod_base = OTHER; note = 2'-O-methyluridine-3'-phosphorothioate
  modified_base 20: mod_base = OTHER; note = 2'-O-methylcytidine
  misc_feature 1..5: note = RNA
  misc_feature 16..20: note = RNA
  misc_feature 6..15: note = DNA
aaaagttccagacatgattc

SEQ ID NO: 557 - DNA, 20 bp, synthetic construct
  source 1..20: mol_type = other DNA
  modified_base 1: mod_base = OTHER; note = 2'-O-methyladenosine-3'-phosphorothioate
  modified_base 2: mod_base = OTHER; note = 2'-O-methyladenosine-3'-phosphorothioate
  modified_base 3: mod_base = OTHER; note = 2'-O-methylguanosine-3'-phosphorothioate
  modified_base 4: mod_base = OTHER; note = 2'-O-methylcytidine-3'-phosphorothioate
  modified_base 5: mod_base = OTHER; note = 2'-O-methyladenosine-3'-phosphorothioate
  modified_base 6: mod_base = OTHER; note = 2'-deoxyguanosine-3'-phosphorothioate
  modified_base 7: mod_base = OTHER; note = 2'-deoxyadenosine-3'-phosphorothioate
  modified_base 8: mod_base = OTHER; note = 2'-deoxyadenosine-3'-phosphorothioate
  modified_base 9: mod_base = OTHER; note = 2'-deoxyadenosine-3'-phosphorothioate
  modified_base 10: mod_base = OTHER; note = 2'-deoxyadenosine-3'-phosphorothioate
  modified_base 11: mod_base = OTHER; note = 5'-methyl-deoxycytidine-3'-phosphorothioate
  modified_base 12: mod_base = OTHER; note = 2'-deoxyadenosine-3'-phosphorothioate
  modified_base 13: mod_base = OTHER; note = 2'-deoxyadenosine-3'-phosphorothioate
  modified_base 14: mod_base = OTHER; note = 2'-deoxyadenosine-3'-phosphorothioate
  modified_base 15: mod_base = OTHER; note = 2'-deoxyadenosine-3'-phosphorothioate
  modified_base 16: mod_base = OTHER; note = 2'-O-methylguanosine-3'-phosphorothioate
  modified_base 17: mod_base = OTHER; note = 2'-O-methyluridine-3'-phosphorothioate
  modified_base 18: mod_base = OTHER; note = 2'-O-methyluridine-3'-phosphorothioate
  modified_base 19: mod_base = OTHER; note = 2'-O-methylcytidine-3'-phosphorothioate
  modified_base 20: mod_base = OTHER; note = 2'-O-methylcytidine
  misc_feature 1..5: note = RNA
  misc_feature 16..20: note = RNA
  misc_feature 6..15: note = DNA
aagcagaaaacaaaagttcc

SEQ ID NO: 558 - DNA, 20 bp, synthetic construct
  source 1..20: mol_type = other DNA
  modified_base 1: mod_base = OTHER; note = 2'-O-methyladenosine-3'-phosphorothioate
  modified_base 2: mod_base = OTHER; note = 2'-O-methyluridine-3'-phosphorothioate
  modified_base 3: mod_base = OTHER; note = 2'-O-methyladenosine-3'-phosphorothioate
  modified_base 4: mod_base = OTHER; note = 2'-O-methylcytidine-3'-phosphorothioate
  modified_base 5: mod_base = OTHER; note = 2'-O-methyluridine-3'-phosphorothioate
  modified_base 6: mod_base = OTHER; note = 2'-deoxythymidine-3'-phosphorothioate
  modified_base 7: mod_base = OTHER; note = 2'-deoxyguanosine-3'-phosphorothioate
  modified_base 8: mod_base = OTHER; note = 2'-deoxyadenosine-3'-phosphorothioate
  modified_base 9: mod_base = OTHER; note = 5'-methyl-deoxycytidine-3'-phosphorothioate
  modified_base 10: mod_base = OTHER; note = 2'-deoxyadenosine-3'-phosphorothioate
  modified_base 11: mod_base = OTHER; note = 2'-deoxyguanosine-3'-phosphorothioate
  modified_base 12: mod_base = OTHER; note = 2'-deoxyadenosine-3'-phosphorothioate
  modified_base 13: mod_base = OTHER; note = 2'-deoxyadenosine-3'-phosphorothioate
  modified_base 14: mod_base = OTHER; note = 2'-deoxyadenosine-3'-phosphorothioate
  modified_base 15: mod_base = OTHER; note = 2'-deoxyguanosine-3'-phosphorothioate
  modified_base 16: mod_base = OTHER; note = 2'-O-methylcytidine-3'-phosphorothioate
  modified_base 17: mod_base = OTHER; note = 2'-O-methyladenosine-3'-phosphorothioate
  modified_base 18: mod_base = OTHER; note = 2'-O-methylguanosine-3'-phosphorothioate
  modified_base 19: mod_base = OTHER; note = 2'-O-methyladenosine-3'-phosphorothioate
  modified_base 20: mod_base = OTHER; note = 2'-O-methyladenosine
  misc_feature 1..5: note = RNA
  misc_feature 16..20: note = RNA
  misc_feature 6..15: note = DNA
atacttgacagaaagcagaa

SEQ ID NO: 559 - DNA, 20 bp, synthetic construct
  source 1..20: mol_type = other DNA
  modified_base 1: mod_base = OTHER; note = 2'-O-methyladenosine-3'-phosphorothioate
  modified_base 2: mod_base = OTHER; note = 2'-O-methyladenosine-3'-phosphorothioate
  modified_base 3: mod_base = OTHER; note = 2'-O-methylguanosine-3'-phosphorothioate
  modified_base 4: mod_base = OTHER; note = 2'-O-methyluridine-3'-phosphorothioate
  modified_base 5: mod_base = OTHER; note = 2'-O-methylguanosine-3'-phosphorothioate
  modified_base 6: mod_base = OTHER; note = 2'-deoxyadenosine-3'-phosphorothioate
  modified_base 7: mod_base = OTHER; note = 2'-deoxyadenosine-3'-phosphorothioate
  modified_base 8: mod_base = OTHER; note = 2'-deoxyguanosine-3'-phosphorothioate
  modified_base 9: mod_base = OTHER; note = 2'-deoxythymidine-3'-phosphorothioate
  modified_base 10: mod_base = OTHER; note = 2'-deoxythymidine-3'-phosphorothioate
  modified_base 11: mod_base = OTHER; note = 2'-deoxythymidine-3'-phosphorothioate
  modified_base 12: mod_base = OTHER; note = 2'-deoxyadenosine-3'-phosphorothioate
  modified_base 13: mod_base = OTHER; note = 2'-deoxythymidine-3'-phosphorothioate
  modified_base 14: mod_base = OTHER; note = 2'-deoxyadenosine-3'-phosphorothioate
  modified_base 15: mod_base = OTHER; note = 5'-methyl-deoxycytidine-3'-phosphorothioate
  modified_base 16: mod_base = OTHER; note = 2'-O-methyluridine-3'-phosphorothioate
  modified_base 17: mod_base = OTHER; note = 2'-O-methyluridine-3'-phosphorothioate
  modified_base 18: mod_base = OTHER; note = 2'-O-methylguanosine-3'-phosphorothioate
  modified_base 19: mod_base = OTHER; note = 2'-O-methyladenosine-3'-phosphorothioate
  modified_base 20: mod_base = OTHER; note = 2'-O-methylcytidine
  misc_feature 1..5: note = RNA
  misc_feature 16..20: note = RNA
  misc_feature 6..15: note = DNA
aagtgaagtttatacttgac

SEQ ID NO: 560 - DNA, 20 bp, synthetic construct
  source 1..20: mol_type = other DNA
  modified_base 1: mod_base = OTHER; note = 2'-O-methyladenosine-3'-phosphorothioate
  modified_base 2: mod_base = OTHER; note = 2'-O-methylcytidine-3'-phosphorothioate
  modified_base 3: mod_base = OTHER; note = 2'-O-methyladenosine-3'-phosphorothioate
  modified_base 4: mod_base = OTHER; note = 2'-O-methylguanosine-3'-phosphorothioate
  modified_base 5: mod_base = OTHER; note = 2'-O-methylcytidine-3'-phosphorothioate
  modified_base 6: mod_base = OTHER; note = 2'-deoxyadenosine-3'-phosphorothioate
  modified_base 7: mod_base = OTHER; note = 2'-deoxythymidine-3'-phosphorothioate
  modified_base 8: mod_base = OTHER; note = 5'-methyl-deoxycytidine-3'-phosphorothioate
  modified_base 9: mod_base = OTHER; note = 2'-deoxyadenosine-3'-phosphorothioate
  modified_base 10: mod_base = OTHER; note = 2'-deoxyadenosine-3'-phosphorothioate
  modified_base 11: mod_base = OTHER; note = 2'-deoxyadenosine-3'-phosphorothioate
  modified_base 12: mod_base = OTHER; note = 2'-deoxyguanosine-3'-phosphorothioate
  modified_base 13: mod_base = OTHER; note = 2'-deoxythymidine-3'-phosphorothioate
  modified_base 14: mod_base = OTHER; note = 2'-deoxyguanosine-3'-phosphorothioate
  modified_base 15: mod_base = OTHER; note = 2'-deoxyadenosine-3'-phosphorothioate
  modified_base 16: mod_base = OTHER; note = 2'-O-methyladenosine-3'-phosphorothioate
  modified_base 17: mod_base = OTHER; note = 2'-O-methylguanosine-3'-phosphorothioate
  modified_base 18: mod_base = OTHER; note = 2'-O-methyluridine-3'-phosphorothioate
  modified_base 19: mod_base = OTHER; note = 2'-O-methyluridine-3'-phosphorothioate
  modified_base 20: mod_base = OTHER; note = 2'-O-methyluridine
  misc_feature 1..5: note = RNA
  misc_feature 16..20: note = RNA
  misc_feature 6..15: note = DNA
acagcatcaaagtgaagttt

SEQ ID NO: 561 - DNA, 20 bp, synthetic construct
  source 1..20: mol_type = other DNA
  modified_base 1: mod_base = OTHER; note = 2'-O-methyluridine-3'-phosphorothioate
  modified_base 2: mod_base = OTHER; note = 2'-O-methylguanosine-3'-phosphorothioate
  modified_base 3: mod_base = OTHER; note = 2'-O-methyladenosine-3'-phosphorothioate
  modified_base 4: mod_base = OTHER; note = 2'-O-methyluridine-3'-phosphorothioate
  modified_base 5: mod_base = OTHER; note = 2'-O-methyluridine-3'-phosphorothioate
  modified_base 6: mod_base = OTHER; note = 2'-deoxythymidine-3'-phosphorothioate
  modified_base 7: mod_base = OTHER; note = 2'-deoxythymidine-3'-phosphorothioate
  modified_base 8: mod_base = OTHER; note = 2'-deoxyguanosine-3'-phosphorothioate
  modified_base 9: mod_base = OTHER; note = 5'-methyl-deoxycytidine-3'-phosphorothioate
  modified_base 10: mod_base = OTHER; note = 2'-deoxyadenosine-3'-phosphorothioate
  modified_base 11: mod_base = OTHER; note = 2'-deoxyadenosine-3'-phosphorothioate
  modified_base 12: mod_base = OTHER; note = 2'-deoxyguanosine-3'-phosphorothioate
  modified_base 13: mod_base = OTHER; note = 2'-deoxythymidine-3'-phosphorothioate
  modified_base 14: mod_base = OTHER; note = 2'-deoxyadenosine-3'-phosphorothioate
  modified_base 15: mod_base = OTHER; note = 5'-methyl-deoxycytidine-3'-phosphorothioate
  modified_base 16: mod_base = OTHER; note = 2'-O-methyladenosine-3'-phosphorothioate
  modified_base 17: mod_base = OTHER; note = 2'-O-methylguanosine-3'-phosphorothioate
  modified_base 18: mod_base = OTHER; note = 2'-O-methylcytidine-3'-phosphorothioate
  modified_base 19: mod_base = OTHER; note = 2'-O-methyladenosine-3'-phosphorothioate
  modified_base 20: mod_base = OTHER; note = 2'-O-methyluridine
  misc_feature 1..5: note = RNA
  misc_feature 16..20: note = RNA
  misc_feature 6..15: note = DNA
tgattttgcaagtacagcat

SEQ ID NO: 562 - DNA, 20 bp, synthetic construct
  source 1..20: mol_type = other DNA
  modified_base 1: mod_base = OTHER; note = 2'-O-methyladenosine-3'-phosphorothioate
  modified_base 2: mod_base = OTHER; note = 2'-O-methyladenosine-3'-phosphorothioate
  modified_base 3: mod_base = OTHER; note = 2'-O-methylguanosine-3'-phosphorothioate
  modified_base 4: mod_base = OTHER; note = 2'-O-methyladenosine-3'-phosphorothioate
  modified_base 5: mod_base = OTHER; note = 2'-O-methyladenosine-3'-phosphorothioate
  modified_base 6: mod_base = OTHER; note = 2'-deoxyadenosine-3'-phosphorothioate
  modified_base 7: mod_base = OTHER; note = 2'-deoxyadenosine-3'-phosphorothioate
  modified_base 8: mod_base = OTHER; note = 2'-deoxythymidine-3'-phosphorothioate
  modified_base 9: mod_base = OTHER; note = 2'-deoxyguanosine-3'-phosphorothioate
  modified_base 10: mod_base = OTHER; note = 2'-deoxythymidine-3'-phosphorothioate
  modified_base 11: mod_base = OTHER; note = 2'-deoxyguanosine-3'-phosphorothioate
  modified_base 12: mod_base = OTHER; note = 2'-deoxyadenosine-3'-phosphorothioate
  modified_base 13: mod_base = OTHER; note = 2'-deoxythymidine-3'-phosphorothioate
  modified_base 14: mod_base = OTHER; note = 2'-deoxythymidine-3'-phosphorothioate
  modified_base 15: mod_base = OTHER; note = 2'-deoxythymidine-3'-phosphorothioate
  modified_base 16: mod_base = OTHER; note = 2'-O-methyluridine-3'-phosphorothioate
  modified_base 17: mod_base = OTHER; note = 2'-O-methylguanosine-3'-phosphorothioate
  modified_base 18: mod_base = OTHER; note = 2'-O-methylcytidine-3'-phosphorothioate
  modified_base 19: mod_base = OTHER; note = 2'-O-methyladenosine-3'-phosphorothioate
  modified_base 20: mod_base = OTHER; note = 2'-O-methyladenosine
  misc_feature 1..5: note = RNA
  misc_feature 16..20: note = RNA
  misc_feature 6..15: note = DNA
aagaaaatgtgattttgcaa

SEQ ID NO: 563 - DNA, 20 bp, synthetic construct
  source 1..20: mol_type = other DNA
  modified_base 1: mod_base = OTHER; note = 2'-O-methylcytidine-3'-phosphorothioate
  modified_base 2: mod_base = OTHER; note = 2'-O-methylguanosine-3'-phosphorothioate
  modified_base 3: mod_base = OTHER; note = 2'-O-methylguanosine-3'-phosphorothioate
  modified_base 4: mod_base = OTHER; note = 2'-O-methyladenosine-3'-phosphorothioate
  modified_base 5: mod_base = OTHER; note = 2'-O-methyladenosine-3'-phosphorothioate
  modified_base 6: mod_base = OTHER; note = 2'-deoxythymidine-3'-phosphorothioate
  modified_base 7: mod_base = OTHER; note = 2'-deoxythymidine-3'-phosphorothioate
  modified_base 8: mod_base = OTHER; note = 2'-deoxythymidine-3'-phosphorothioate
  modified_base 9: mod_base = OTHER; note = 5'-methyl-deoxycytidine-3'-phosphorothioate
  modified_base 10: mod_base = OTHER; note = 5'-methyl-deoxycytidine-3'-phosphorothioate
  modified_base 11: mod_base = OTHER; note = 2'-deoxyadenosine-3'-phosphorothioate
  modified_base 12: mod_base = OTHER; note = 2'-deoxyguanosine-3'-phosphorothioate
  modified_base 13: mod_base = OTHER; note = 2'-deoxyadenosine-3'-phosphorothioate
  modified_base 14: mod_base = OTHER; note = 2'-deoxyadenosine-3'-phosphorothioate
  modified_base 15: mod_base = OTHER; note = 2'-deoxyadenosine-3'-phosphorothioate
  modified_base 16: mod_base = OTHER; note = 2'-O-methylguanosine-3'-phosphorothioate
  modified_base 17: mod_base = OTHER; note = 2'-O-methyladenosine-3'-phosphorothioate
  modified_base 18: mod_base = OTHER; note = 2'-O-methyladenosine-3'-phosphorothioate
  modified_base 19: mod_base = OTHER; note = 2'-O-methyladenosine-3'-phosphorothioate
  modified_base 20: mod_base = OTHER; note = 2'-O-methyladenosine
  misc_feature 1..5: note = RNA
  misc_feature 16..20: note = RNA
  misc_feature 6..15: note = DNA
cggaatttccagaaagaaaa

SEQ ID NO: 564 - DNA, 20 bp, synthetic construct
  source 1..20: mol_type = other DNA
  modified_base 1: mod_base = OTHER; note = 2'-O-methyladenosine-3'-phosphorothioate
  modified_base 2: mod_base = OTHER; note = 2'-O-methylguanosine-3'-phosphorothioate
  modified_base 3: mod_base = OTHER; note = 2'-O-methylguanosine-3'-phosphorothioate
  modified_base 4: mod_base = OTHER; note = 2'-O-methyluridine-3'-phosphorothioate
  modified_base 5: mod_base = OTHER; note = 2'-O-methyladenosine-3'-phosphorothioate
  modified_base 6: mod_base = OTHER; note = 5'-methyl-deoxycytidine-3'-phosphorothioate
  modified_base 7: mod_base = OTHER; note = 2'-deoxyadenosine-3'-phosphorothioate
  modified_base 8: mod_base = OTHER; note = 5'-methyl-deoxycytidine-3'-phosphorothioate
  modified_base 9: mod_base = OTHER; note = 2'-deoxythymidine-3'-phosphorothioate
  modified_base 10: mod_base = OTHER; note = 2'-deoxyguanosine-3'-phosphorothioate
  modified_base 11: mod_base = OTHER; note = 5'-methyl-deoxycytidine-3'-phosphorothioate
  modified_base 12: mod_base = OTHER; note = 5'-methyl-deoxycytidine-3'-phosphorothioate
  modified_base 13: mod_base = OTHER; note = 2'-deoxyguanosine-3'-phosphorothioate
  modified_base 14: mod_base = OTHER; note = 2'-deoxyguanosine-3'-phosphorothioate
  modified_base 15: mod_base = OTHER; note = 2'-deoxyadenosine-3'-phosphorothioate
  modified_base 16: mod_base = OTHER; note = 2'-O-methyladenosine-3'-phosphorothioate
  modified_base 17: mod_base = OTHER; note = 2'-O-methyluridine-3'-phosphorothioate
  modified_base 18: mod_base = OTHER; note = 2'-O-methyluridine-3'-phosphorothioate
  modified_base 19: mod_base = OTHER; note = 2'-O-methyluridine-3'-phosphorothioate
  modified_base 20: mod_base = OTHER; note = 2'-O-methylcytidine
  misc_feature 1..5: note = RNA
  misc_feature 16..20: note = RNA
  misc_feature 6..15: note = DNA
aggtacactgccggaatttc

SEQ ID NO: 565 - DNA, 20 bp, synthetic construct
  source 1..20: mol_type = other DNA
  modified_base 1: mod_base = OTHER; note = 2'-O-methyluridine-3'-phosphorothioate
  modified_base 2: mod_base = OTHER; note = 2'-O-methyladenosine-3'-phosphorothioate
  modified_base 3: mod_base = OTHER; note = 2'-O-methylguanosine-3'-phosphorothioate
  modified_base 4: mod_base = OTHER; note = 2'-O-methylcytidine-3'-phosphorothioate
  modified_base 5: mod_base = OTHER; note = 2'-O-methyladenosine-3'-phosphorothioate
  modified_base 6: mod_base = OTHER; note = 2'-deoxyguanosine-3'-phosphorothioate
  modified_base 7: mod_base = OTHER; note = 2'-deoxythymidine-3'-phosphorothioate
  modified_base 8: mod_base = OTHER; note = 5'-methyl-deoxycytidine-3'-phosphorothioate
  modified_base 9: mod_base = OTHER; note = 2'-deoxyadenosine-3'-phosphorothioate
  modified_base 10: mod_base = OTHER; note = 2'-deoxyadenosine-3'-phosphorothioate
  modified_base 11: mod_base = OTHER; note = 2'-deoxyguanosine-3'-phosphorothioate
  modified_base 12: mod_base = OTHER; note = 2'-deoxyguanosine-3'-phosphorothioate
  modified_base 13: mod_base = OTHER; note = 2'-deoxythymidine-3'-phosphorothioate
  modified_base 14: mod_base = OTHER; note = 2'-deoxyadenosine-3'-phosphorothioate
  modified_base 15: mod_base = OTHER; note = 5'-methyl-deoxycytidine-3'-phosphorothioate
  modified_base 16: mod_base = OTHER; note = 2'-O-methyladenosine-3'-phosphorothioate
  modified_base 17: mod_base = OTHER; note = 2'-O-methylcytidine-3'-phosphorothioate
  modified_base 18: mod_base = OTHER; note = 2'-O-methyluridine-3'-phosphorothioate
  modified_base 19: mod_base = OTHER; note = 2'-O-methylguanosine-3'-phosphorothioate
  modified_base 20: mod_base = OTHER; note = 2'-O-methylcytidine
  misc_feature 1..5: note = RNA
  misc_feature 16..20: note = RNA
  misc_feature 6..15: note = DNA
tagcagtcaaggtacactgc

SEQ ID NO: 566 - DNA, 20 bp, synthetic construct
  source 1..20: mol_type = other DNA
  modified_base 1: mod_base = OTHER; note = 2'-O-methylguanosine-3'-phosphorothioate
  modified_base 2: mod_base = OTHER; note = 2'-O-methylcytidine-3'-phosphorothioate
  modified_base 3: mod_base = OTHER; note = 2'-O-methyladenosine-3'-phosphorothioate
  modified_base 4: mod_base = OTHER; note = 2'-O-methylcytidine-3'-phosphorothioate
  modified_base 5: mod_base = OTHER; note = 2'-O-methyladenosine-3'-phosphorothioate
  modified_base 6: mod_base = OTHER; note = 2'-deoxyguanosine-3'-phosphorothioate
  modified_base 7: mod_base = OTHER; note = 2'-deoxyguanosine-3'-phosphorothioate
  modified_base 8: mod_base = OTHER; note = 2'-deoxyguanosine-3'-phosphorothioate
  modified_base 9: mod_base = OTHER; note = 2'-deoxythymidine-3'-phosphorothioate
  modified_base 10: mod_base = OTHER; note = 2'-deoxyadenosine-3'-phosphorothioate
  modified_base 11: mod_base = OTHER; note = 2'-deoxyguanosine-3'-phosphorothioate
  modified_base 12: mod_base = OTHER; note = 5'-methyl-deoxycytidine-3'-phosphorothioate
  modified_base 13: mod_base = OTHER; note = 2'-deoxythymidine-3'-phosphorothioate
  modified_base 14: mod_base = OTHER; note = 2'-deoxyadenosine-3'-phosphorothioate
  modified_base 15: mod_base = OTHER; note = 2'-deoxyguanosine-3'-phosphorothioate
  modified_base 16: mod_base = OTHER; note = 2'-O-methylcytidine-3'-phosphorothioate
  modified_base 17: mod_base = OTHER; note = 2'-O-methyladenosine-3'-phosphorothioate
  modified_base 18: mod_base = OTHER; note = 2'-O-methylguanosine-3'-phosphorothioate
  modified_base 19: mod_base = OTHER; note = 2'-O-methyluridine-3'-phosphorothioate
  modified_base 20: mod_base = OTHER; note = 2'-O-methylcytidine
  misc_feature 1..5: note = RNA
  misc_feature 16..20: note = RNA
  misc_feature 6..15: note = DNA
gcacagggtagctagcagtc

SEQ ID NO: 567 - DNA, 20 bp, synthetic construct
  source 1..20: mol_type = other DNA
  modified_base 1: mod_base = OTHER; note = 2'-O-methyladenosine-3'-phosphorothioate
  modified_base 2: mod_base = OTHER; note = 2'-O-methylguanosine-3'-phosphorothioate
  modified_base 3: mod_base = OTHER; note = 2'-O-methylguanosine-3'-phosphorothioate
  modified_base 4: mod_base = OTHER; note = 2'-O-methylcytidine-3'-phosphorothioate
  modified_base 5: mod_base = OTHER; note = 2'-O-methyluridine-3'-phosphorothioate
  modified_base 6: mod_base = OTHER; note = 2'-deoxythymidine-3'-phosphorothioate
  modified_base 7: mod_base = OTHER; note = 2'-deoxythymidine-3'-phosphorothioate
  modified_base 8: mod_base = OTHER; note = 2'-deoxythymidine-3'-phosphorothioate
  modified_base 9: mod_base = OTHER; note = 5'-methyl-deoxycytidine-3'-phosphorothioate
  modified_base 10: mod_base = OTHER; note = 2'-deoxythymidine-3'-phosphorothioate
  modified_base 11: mod_base = OTHER; note = 2'-deoxyguanosine-3'-phosphorothioate
  modified_base 12: mod_base = OTHER; note = 2'-deoxyguanosine-3'-phosphorothioate
  modified_base 13: mod_base = OTHER; note = 5'-methyl-deoxycytidine-3'-phosphorothioate
  modified_base 14: mod_base = OTHER; note = 2'-deoxyadenosine-3'-phosphorothioate
  modified_base 15: mod_base = OTHER; note = 5'-methyl-deoxycytidine-3'-phosphorothioate
  modified_base 16: mod_base = OTHER; note = 2'-O-methyladenosine-3'-phosphorothioate
  modified_base 17: mod_base = OTHER; note = 2'-O-methylguanosine-3'-phosphorothioate
  modified_base 18: mod_base = OTHER; note = 2'-O-methylguanosine-3'-phosphorothioate
  modified_base 19: mod_base = OTHER; note = 2'-O-methylguanosine-3'-phosphorothioate
  modified_base 20: mod_base = OTHER; note = 2'-O-methyluridine
  misc_feature 1..5: note = RNA
  misc_feature 16..20: note = RNA
  misc_feature 6..15: note = DNA
aggcttttctggcacagggt

SEQ ID NO: 568 - DNA, 20 bp, synthetic construct
  source 1..20: mol_type = other DNA
  modified_base 1: mod_base = OTHER; note = 2'-O-methylcytidine-3'-phosphorothioate
  modified_base 2: mod_base = OTHER; note = 2'-O-methyladenosine-3'-phosphorothioate
  modified_base 3: mod_base = OTHER; note = 2'-O-methylcytidine-3'-phosphorothioate
  modified_base 4: mod_base = OTHER; note = 2'-O-methyladenosine-3'-phosphorothioate
  modified_base 5: mod_base = OTHER; note = 2'-O-methyladenosine-3'-phosphorothioate
  modified_base 6: mod_base = OTHER; note = 5'-methyl-deoxycytidine-3'-phosphorothioate
  modified_base 7: mod_base = OTHER; note = 2'-deoxyguanosine-3'-phosphorothioate
  modified_base 8: mod_base = OTHER; note = 2'-deoxyadenosine-3'-phosphorothioate
  modified_base 9: mod_base = OTHER; note = 2'-deoxyadenosine-3'-phosphorothioate
  modified_base 10: mod_base = OTHER; note = 2'-deoxythymidine-3'-phosphorothioate
  modified_base 11: mod_base = OTHER; note = 2'-deoxyguanosine-3'-phosphorothioate
  modified_base 12: mod_base = OTHER; note = 2'-deoxyadenosine-3'-phosphorothioate
  modified_base 13: mod_base = OTHER; note = 2'-deoxyguanosine-3'-phosphorothioate
  modified_base 14: mod_base = OTHER; note = 2'-deoxyguanosine-3'-phosphorothioate
  modified_base 15: mod_base = OTHER; note = 5'-methyl-deoxycytidine-3'-phosphorothioate
  modified_base 16: mod_base = OTHER; note = 2'-O-methyluridine-3'-phosphorothioate
  modified_base 17: mod_base = OTHER; note = 2'-O-methyluridine-3'-phosphorothioate
  modified_base 18: mod_base = OTHER; note = 2'-O-methyluridine-3'-phosphorothioate
  modified_base 19: mod_base = OTHER; note = 2'-O-methyluridine-3'-phosphorothioate
  modified_base 20: mod_base = OTHER; note = 2'-O-methylcytidine
  misc_feature 1..5: note = RNA
  misc_feature 16..20: note = RNA
  misc_feature 6..15: note = DNA
cacaacgaatgaggcttttc

SEQ ID NO: 569 - DNA, 20 bp, synthetic construct
  source 1..20: mol_type = other DNA
  modified_base 1: mod_base = OTHER; note = 2'-O-methyladenosine-3'-phosphorothioate
  modified_base 2: mod_base = OTHER; note = 2'-O-methylguanosine-3'-phosphorothioate
  modified_base 3: mod_base = OTHER; note = 2'-O-methylguanosine-3'-phosphorothioate
  modified_base 4: mod_base = OTHER; note = 2'-O-methylguanosine-3'-phosphorothioate
  modified_base 5: mod_base = OTHER; note = 2'-O-methyluridine-3'-phosphorothioate
  modified_base 6: mod_base = OTHER; note = 2'-deoxythymidine-3'-phosphorothioate
  modified_base 7: mod_base = OTHER; note = 5'-methyl-deoxycytidine-3'-phosphorothioate
  modified_base 8: mod_base = OTHER; note = 2'-deoxyadenosine-3'-phosphorothioate
  modified_base 9: mod_base = OTHER; note = 2'-deoxyadenosine-3'-phosphorothioate
  modified_base 10: mod_base = OTHER; note = 2'-deoxyguanosine-3'-phosphorothioate
  modified_base 11: mod_base = OTHER; note = 5'-methyl-deoxycytidine-3'-phosphorothioate
  modified_base 12: mod_base = OTHER; note = 2'-deoxyadenosine-3'-phosphorothioate
  modified_base 13: mod_base = OTHER; note = 5'-methyl-deoxycytidine-3'-phosphorothioate
  modified_base 14: mod_base = OTHER; note = 2'-deoxyadenosine-3'-phosphorothioate
  modified_base 15: mod_base = OTHER; note = 2'-deoxyadenosine-3'-phosphorothioate
  modified_base 16: mod_base = OTHER; note = 2'-O-methylcytidine-3'-phosphorothioate
  modified_base 17: mod_base = OTHER; note = 2'-O-methylguanosine-3'-phosphorothioate
  modified_base 18: mod_base = OTHER; note = 2'-O-methyladenosine-3'-phosphorothioate
  modified_base 19: mod_base = OTHER; note = 2'-O-methyladenosine-3'-phosphorothioate
  modified_base 20: mod_base = OTHER; note = 2'-O-methyluridine
  misc_feature 1..5: note = RNA
  misc_feature 16..20: note = RNA
  misc_feature 6..15: note = DNA
agggttcaagcacaacgaat

SEQ ID NO: 570 - DNA, 20 bp, synthetic construct
  source 1..20: mol_type = other DNA
  modified_base 1: mod_base = OTHER; note = 2'-O-methylguanosine-3'-phosphorothioate
  modified_base 2: mod_base = OTHER; note = 2'-O-methylguanosine-3'-phosphorothioate
  modified_base 3: mod_base = OTHER; note = 2'-O-methyluridine-3'-phosphorothioate
  modified_base 4: mod_base = OTHER; note = 2'-O-methylguanosine-3'-phosphorothioate
  modified_base 5: mod_base = OTHER; note = 2'-O-methylguanosine-3'-phosphorothioate
  modified_base 6: mod_base = OTHER; note = 5'-methyl-deoxycytidine-3'-phosphorothioate
  modified_base 7: mod_base = OTHER; note = 2'-deoxyadenosine-3'-phosphorothioate
  modified_base 8: mod_base = OTHER; note = 2'-deoxythymidine-3'-phosphorothioate
  modified_base 9: mod_base = OTHER; note = 2'-deoxythymidine-3'-phosphorothioate
  modified_base 10: mod_base = OTHER; note = 5'-methyl-deoxycytidine-3'-phosphorothioate
  modified_base 11: mod_base = OTHER; note = 2'-deoxyadenosine-3'-phosphorothioate
  modified_base 12: mod_base = OTHER; note = 2'-deoxyadenosine-3'-phosphorothioate
  modified_base 13: mod_base = OTHER; note = 2'-deoxyguanosine-3'-phosphorothioate
  modified_base 14: mod_base = OTHER; note = 2'-deoxyguanosine-3'-phosphorothioate
  modified_base 15: mod_base = OTHER; note = 2'-deoxyguanosine-3'-phosphorothioate
  modified_base 16: mod_base = OTHER; note = 2'-O-methyluridine-3'-phosphorothioate
  modified_base 17: mod_base = OTHER; note = 2'-O-methyluridine-3'-phosphorothioate
  modified_base 18: mod_base = OTHER; note = 2'-O-methylcytidine-3'-phosphorothioate
  modified_base 19: mod_base = OTHER; note = 2'-O-methyladenosine-3'-phosphorothioate
  modified_base 20: mod_base = OTHER; note = 2'-O-methyladenosine
  misc_feature 1..5: note = RNA
  misc_feature 16..20: note = RNA
  misc_feature 6..15: note = DNA
ggtggcattcaagggttcaa

SEQ ID NO: 571 - DNA, 20 bp, synthetic construct
  source 1..20: mol_type = other DNA
  modified_base 1: mod_base = OTHER; note = 2'-O-methyladenosine-3'-phosphorothioate
  modified_base 2: mod_base = OTHER; note = 2'-O-methylguanosine-3'-phosphorothioate
  modified_base 3: mod_base = OTHER; note = 2'-O-methyluridine-3'-phosphorothioate
  modified_base 4: mod_base = OTHER; note = 2'-O-methylguanosine-3'-phosphorothioate
  modified_base 5: mod_base = OTHER; note = 2'-O-methyladenosine-3'-phosphorothioate
  modified_base 6: mod_base = OTHER; note = 2'-deoxythymidine-3'-phosphorothioate
  modified_base 7: mod_base = OTHER; note = 2'-deoxyguanosine-3'-phosphorothioate
  modified_base 8: mod_base = OTHER; note = 2'-deoxyadenosine-3'-phosphorothioate
  modified_base 9: mod_base = OTHER; note = 5'-methyl-deoxycytidine-3'-phosphorothioate
  modified_base 10: mod_base = OTHER; note = 2'-deoxyadenosine-3'-phosphorothioate
  modified_base 11: mod_base = OTHER; note = 2'-deoxyguanosine-3'-phosphorothioate
  modified_base 12: mod_base = OTHER; note = 5'-methyl-deoxycytidine-3'-phosphorothioate
  modified_base 13: mod_base = OTHER; note = 2'-deoxythymidine-3'-phosphorothioate
  modified_base 14: mod_base = OTHER; note = 2'-deoxyguanosine-3'-phosphorothioate
  modified_base 15: mod_base = OTHER; note = 2'-deoxyguanosine-3'-phosphorothioate
  modified_base 16: mod_base = OTHER; note = 2'-O-methyluridine-3'-phosphorothioate
  modified_base 17: mod_base = OTHER; note = 2'-O-methylguanosine-3'-phosphorothioate
  modified_base 18: mod_base = OTHER; note = 2'-O-methylguanosine-3'-phosphorothioate
  modified_base 19: mod_base = OTHER; note = 2'-O-methylcytidine-3'-phosphorothioate
  modified_base 20: mod_base = OTHER; note = 2'-O-methyladenosine
  misc_feature 1..5: note = RNA
  misc_feature 16..20: note = RNA
  misc_feature 6..15: note = DNA
agtgatgacagctggtggca

SEQ ID NO: 572 - DNA, 20 bp, synthetic construct
  source 1..20: mol_type = other DNA
  modified_base 1: mod_base = OTHER; note = 2'-O-methyladenosine-3'-phosphorothioate
  modified_base 2: mod_base = OTHER; note = 2'-O-methylguanosine-3'-phosphorothioate
  modified_base 3: mod_base = OTHER; note = 2'-O-methylguanosine-3'-phosphorothioate
  modified_base 4: mod_base = OTHER; note = 2'-O-methylguanosine-3'-phosphorothioate
  modified_base 5: mod_base = OTHER; note = 2'-O-methylcytidine-3'-phosphorothioate
  modified_base 6: mod_base = OTHER; note = 2'-deoxythymidine-3'-phosphorothioate
  modified_base 7: mod_base = OTHER; note = 2'-deoxyguanosine-3'-phosphorothioate
  modified_base 8: mod_base = OTHER; note = 2'-deoxythymidine-3'-phosphorothioate
  modified_base 9: mod_base = OTHER; note = 2'-deoxyguanosine-3'-phosphorothioate
  modified_base 10: mod_base = OTHER; note = 2'-deoxythymidine-3'-phosphorothioate
  modified_base 11: mod_base = OTHER; note = 2'-deoxyadenosine-3'-phosphorothioate
  modified_base 12: mod_base = OTHER; note = 2'-deoxyguanosine-3'-phosphorothioate
  modified_base 13: mod_base = OTHER; note = 2'-deoxythymidine-3'-phosphorothioate
  modified_base 14: mod_base = OTHER; note = 2'-deoxyguanosine-3'-phosphorothioate
  modified_base 15: mod_base = OTHER; note = 2'-deoxyadenosine-3'-phosphorothioate
  modified_base 16: mod_base = OTHER; note = 2'-O-methyluridine-3'-phosphorothioate
  modified_base 17: mod_base = OTHER; note = 2'-O-methylguanosine-3'-phosphorothioate
  modified_base 18: mod_base = OTHER; note = 2'-O-methyladenosine-3'-phosphorothioate
  modified_base 19: mod_base = OTHER; note = 2'-O-methylcytidine-3'-phosphorothioate
  modified_base 20: mod_base = OTHER; note = 2'-O-methyladenosine
  misc_feature 1..5: note = RNA
  misc_feature 16..20: note = RNA
  misc_feature 6..15: note = DNA
agggctgtgtagtgatgaca

SEQ ID NO: 573 - DNA, 20 bp, synthetic construct
  source 1..20: mol_type = other DNA
  modified_base 1: mod_base = OTHER; note = 2'-O-methyladenosine-3'-phosphorothioate
  modified_base 2: mod_base = OTHER; note = 2'-O-methylguanosine-3'-phosphorothioate
  modified_base 3: mod_base = OTHER; note = 2'-O-methylcytidine-3'-phosphorothioate
  modified_base 4: mod_base = OTHER; note = 2'-O-methylcytidine-3'-phosphorothioate
  modified_base 5: mod_base = OTHER; note = 2'-O-methyluridine-3'-phosphorothioate
  modified_base 6: mod_base = OTHER; note = 5'-methyl-deoxycytidine-3'-phosphorothioate
  modified_base 7: mod_base = OTHER; note = 2'-deoxythymidine-3'-phosphorothioate
  modified_base 8: mod_base = OTHER; note = 2'-deoxythymidine-3'-phosphorothioate
  modified_base 9: mod_base = OTHER; note = 2'-deoxyadenosine-3'-phosphorothioate
  modified_base 10: mod_base = OTHER; note = 2'-deoxyguanosine-3'-phosphorothioate
  modified_base 11: mod_base = OTHER; note = 2'-deoxyguanosine-3'-phosphorothioate
  modified_base 12: mod_base = OTHER; note = 2'-deoxyadenosine-3'-phosphorothioate
  modified_base 13: mod_base = OTHER; note = 2'-deoxyguanosine-3'-phosphorothioate
  modified_base 14: mod_base = OTHER; note = 2'-deoxyguanosine-3'-phosphorothioate
  modified_base 15: mod_base = OTHER; note = 2'-deoxyguanosine-3'-phosphorothioate
  modified_base 16: mod_base = OTHER; note = 2'-O-methylcytidine-3'-phosphorothioate
  modified_base 17: mod_base = OTHER; note = 2'-O-methyluridine-3'-phosphorothioate
  modified_base 18: mod_base = OTHER; note = 2'-O-methylguanosine-3'-phosphorothioate
  modified_base 19: mod_base = OTHER; note = 2'-O-methyluridine-3'-phosphorothioate
  modified_base 20: mod_base = OTHER; note = 2'-O-methylguanosine
  misc_feature 1..5: note = RNA
  misc_feature 16..20: note = RNA
  misc_feature 6..15: note = DNA
agcctcttaggagggctgtg

SEQ ID NO: 574 - DNA, 20 bp, synthetic construct
  source 1..20: mol_type = other DNA
  modified_base 1: mod_base = OTHER; note = 2'-O-methyladenosine-3'-phosphorothioate
  modified_base 2: mod_base = OTHER; note = 2'-O-methylcytidine-3'-phosphorothioate
  modified_base 3: mod_base = OTHER; note = 2'-O-methylcytidine-3'-phosphorothioate
  modified_base 4: mod_base = OTHER; note = 2'-O-methyluridine-3'-phosphorothioate
  modified_base 5: mod_base = OTHER; note = 2'-O-methylcytidine-3'-phosphorothioate
  modified_base 6: mod_base = OTHER; note = 5'-methyl-deoxycytidine-3'-phosphorothioate
  modified_base 7: mod_base = OTHER; note = 2'-deoxyadenosine-3'-phosphorothioate
  modified_base 8: mod_base = OTHER; note = 2'-deoxyguanosine-3'-phosphorothioate
  modified_base 9: mod_base = OTHER; note = 2'-deoxyguanosine-3'-phosphorothioate
  modified_base 10: mod_base = OTHER; note = 2'-deoxyadenosine-3'-phosphorothioate
  modified_base 11: mod_base = OTHER; note = 2'-deoxyadenosine-3'-phosphorothioate
  modified_base 12: mod_base = OTHER; note = 2'-deoxyguanosine-3'-phosphorothioate
  modified_base 13: mod_base = OTHER; note = 5'-methyl-deoxycytidine-3'-phosphorothioate
  modified_base 14: mod_base = OTHER; note = 5'-methyl-deoxycytidine-3'-phosphorothioate
  modified_base 15: mod_base = OTHER; note = 2'-deoxythymidine-3'-phosphorothioate
  modified_base 16: mod_base = OTHER; note = 2'-O-methylcytidine-3'-phosphorothioate
  modified_base 17: mod_base = OTHER; note = 2'-O-methyluridine-3'-phosphorothioate
  modified_base 18: mod_base = OTHER; note = 2'-O-methyluridine-3'-phosphorothioate
  modified_base 19: mod_base = OTHER; note = 2'-O-methyladenosine-3'-phosphorothioate
  modified_base 20: mod_base = OTHER; note = 2'-O-methylguanosine
  misc_feature 1..5: note = RNA
  misc_feature 16..20: note = RNA
  misc_feature 6..15: note = DNA
acctccaggaagcctcttag

SEQ ID NO: 575 - DNA, 20 bp, synthetic construct
  source 1..20: mol_type = other DNA
  modified_base 1: mod_base = OTHER; note = 2'-O-methylcytidine-3'-phosphorothioate
  modified_base 2: mod_base = OTHER; note = 2'-O-methyluridine-3'-phosphorothioate
  modified_base 3: mod_base = OTHER; note = 2'-O-methylguanosine-3'-phosphorothioate
  modified_base 4: mod_base = OTHER; note = 2'-O-methyladenosine-3'-phosphorothioate
  modified_base 5: mod_base = OTHER; note = 2'-O-methyladenosine-3'-phosphorothioate
  modified_base 6: mod_base = OTHER; note = 2'-deoxythymidine-3'-phosphorothioate
  modified_base 7: mod_base = OTHER; note = 5'-methyl-deoxycytidine-3'-phosphorothioate
  modified_base 8: mod_base = OTHER; note = 2'-deoxythymidine-3'-phosphorothioate
  modified_base 9: mod_base = OTHER; note = 5'-methyl-deoxycytidine-3'-phosphorothioate
  modified_base 10: mod_base = OTHER; note = 2'-deoxyguanosine-3'-phosphorothioate
  modified_base 11: mod_base = OTHER; note = 2'-deoxyadenosine-3'-phosphorothioate
  modified_base 12: mod_base = OTHER; note = 2'-deoxyadenosine-3'-phosphorothioate
  modified_base 13: mod_base = OTHER; note = 2'-deoxyadenosine-3'-phosphorothioate
  modified_base 14: mod_base = OTHER; note = 5'-methyl-deoxycytidine-3'-phosphorothioate
  modified_base 15: mod_base = OTHER; note = 5'-methyl-deoxycytidine-3'-phosphorothioate
  modified_base 16: mod_base = OTHER; note = 2'-O-methyluridine-3'-phosphorothioate
  modified_base 17: mod_base = OTHER; note = 2'-O-methylcytidine-3'-phosphorothioate
  modified_base 18: mod_base = OTHER; note = 2'-O-methylcytidine-3'-phosphorothioate
  modified_base 19: mod_base = OTHER; note = 2'-O-methyladenosine-3'-phosphorothioate
  modified_base 20: mod_base = OTHER; note = 2'-O-methylguanosine
  misc_feature 1..5: note = RNA
  misc_feature 16..20: note = RNA
  misc_feature 6..15: note = DNA
ctgaatctcgaaacctccag

SEQ ID NO: 576 - DNA, 20 bp, synthetic construct
  source 1..20: mol_type = other DNA
  modified_base 1: mod_base = OTHER; note = 2'-O-methyluridine-3'-phosphorothioate
  modified_base 2: mod_base = OTHER; note = 2'-O-methylcytidine-3'-phosphorothioate
  modified_base 3: mod_base = OTHER; note = 2'-O-methylcytidine-3'-phosphorothioate
  modified_base 4: mod_base = OTHER; note = 2'-O-methylcytidine-3'-phosphorothioate
  modified_base 5: mod_base = OTHER; note = 2'-O-methyladenosine-3'-phosphorothioate
  modified_base 6: mod_base = OTHER; note = 2'-deoxyguanosine-3'-phosphorothioate
  modified_base 7: mod_base = OTHER; note = 2'-deoxyguanosine-3'-phosphorothioate
  modified_base 8: mod_base = OTHER; note = 2'-deoxyguanosine-3'-phosphorothioate
  modified_base 9: mod_base = OTHER; note = 5'-methyl-deoxycytidine-3'-phosphorothioate
  modified_base 10: mod_base = OTHER; note = 2'-deoxyadenosine-3'-phosphorothioate
  modified_base 11: mod_base = OTHER; note = 2'-deoxythymidine-3'-phosphorothioate
  modified_base 12: mod_base = OTHER; note = 5'-methyl-deoxycytidine-3'-phosphorothioate
  modified_base 13: mod_base = OTHER; note = 2'-deoxythymidine-3'-phosphorothioate
  modified_base 14: mod_base = OTHER; note = 2'-deoxyguanosine-3'-phosphorothioate
  modified_base 15: mod_base = OTHER; note = 2'-deoxyadenosine-3'-phosphorothioate
  modified_base 16: mod_base = OTHER; note = 2'-O-methyladenosine-3'-phosphorothioate
  modified_base 17: mod_base = OTHER; note = 2'-O-methyluridine-3'-phosphorothioate
  modified_base 18: mod_base = OTHER; note = 2'-O-methylcytidine-3'-phosphorothioate
  modified_base 19: mod_base = OTHER; note = 2'-O-methyluridine-3'-phosphorothioate
  modified_base 20: mod_base = OTHER; note = 2'-O-methylcytidine
  misc_feature 1..5: note = RNA
  misc_feature 16..20: note = RNA
  misc_feature 6..15: note = DNA
tcccagggcatctgaatctc

SEQ ID NO: 577 - DNA, 20 bp, synthetic construct
  source 1..20: mol_type = other DNA
  modified_base 1: mod_base = OTHER; note = 2'-O-methylcytidine-3'-phosphorothioate
  modified_base 2: mod_base = OTHER; note = 2'-O-methyluridine-3'-phosphorothioate
  modified_base 3: mod_base = OTHER; note = 2'-O-methylcytidine-3'-phosphorothioate
  modified_base 4: mod_base = OTHER; note = 2'-O-methyluridine-3'-phosphorothioate
  modified_base 5: mod_base = OTHER; note = 2'-O-methylguanosine-3'-phosphorothioate
  modified_base 6: mod_base = OTHER; note = 2'-deoxyguanosine-3'-phosphorothioate
  modified_base 7: mod_base = OTHER; note = 2'-deoxyguanosine-3'-phosphorothioate
  modified_base 8: mod_base = OTHER; note = 2'-deoxyadenosine-3'-phosphorothioate
  modified_base 9: mod_base = OTHER; note = 2'-deoxythymidine-3'-phosphorothioate
  modified_base 10: mod_base = OTHER; note = 5'-methyl-deoxycytidine-3'-phosphorothioate
  modified_base 11: mod_base = OTHER; note = 2'-deoxythymidine-3'-phosphorothioate
  modified_base 12: mod_base = OTHER; note = 5'-methyl-deoxycytidine-3'-phosphorothioate
  modified_base 13: mod_base = OTHER; note = 5'-methyl-deoxycytidine-3'-phosphorothioate
  modified_base 14: mod_base = OTHER; note = 5'-methyl-deoxycytidine-3'-phosphorothioate
  modified_base 15: mod_base = OTHER; note = 2'-deoxyadenosine-3'-phosphorothioate
  modified_base 16: mod_base = OTHER; note = 2'-O-methylguanosine-3'-phosphorothioate
  modified_base 17: mod_base = OTHER; note = 2'-O-methylguanosine-3'-phosphorothioate
  modified_base 18: mod_base = OTHER; note = 2'-O-methylguanosine-3'-phosphorothioate
  modified_base 19: mod_base = OTHER; note = 2'-O-methylcytidine-3'-phosphorothioate
  modified_base 20: mod_base = OTHER; note = 2'-O-methyladenosine
  misc_feature 1..5: note = RNA
  misc_feature 16..20: note = RNA
  misc_feature 6..15: note = DNA
ctctgggatctcccagggca

SEQ ID NO: 578 - DNA, 20 bp, synthetic construct
  source 1..20: mol_type = other DNA
  modified_base 1: mod_base = OTHER; note = 2'-O-methylguanosine-3'-phosphorothioate
  modified_base 2: mod_base = OTHER; note = 2'-O-methylguanosine-3'-phosphorothioate
  modified_base 3: mod_base = OTHER; note = 2'-O-methylguanosine-3'-phosphorothioate
  modified_base 4: mod_base = OTHER; note = 2'-O-methyladenosine-3'-phosphorothioate
  modified_base 5: mod_base = OTHER; note = 2'-O-methyladenosine-3'-phosphorothioate
  modified_base 6: mod_base = OTHER; note = 2'-deoxyadenosine-3'-phosphorothioate
  modified_base 7: mod_base = OTHER; note = 2'-deoxyguanosine-3'-phosphorothioate
  modified_base 8: mod_base = OTHER; note = 2'-deoxyguanosine-3'-phosphorothioate
  modified_base 9: mod_base = OTHER; note = 2'-deoxyadenosine-3'-phosphorothioate
  modified_base 10: mod_base = OTHER; note = 2'-deoxyadenosine-3'-phosphorothioate
  modified_base 11: mod_base = OTHER; note = 2'-deoxyadenosine-3'-phosphorothioate
  modified_base 12: mod_base = OTHER; note = 5'-methyl-deoxycytidine-3'-phosphorothioate
  modified_base 13: mod_base = OTHER; note = 2'-deoxythymidine-3'-phosphorothioate
  modified_base 14: mod_base = OTHER; note = 5'-methyl-deoxycytidine-3'-phosphorothioate
  modified_base 15: mod_base = OTHER; note = 2'-deoxythymidine-3'-phosphorothioate
  modified_base 16: mod_base = OTHER; note = 2'-O-methylguanosine-3'-phosphorothioate
  modified_base 17: mod_base = OTHER; note = 2'-O-methylguanosine-3'-phosphorothioate
  modified_base 18: mod_base = OTHER; note = 2'-O-methylguanosine-3'-phosphorothioate
  modified_base 19: mod_base = OTHER; note = 2'-O-methyladenosine-3'-phosphorothioate
  modified_base 20: mod_base = OTHER; note = 2'-O-methyluridine
  misc_feature 1..5: note = RNA
  misc_feature 16..20: note = RNA
  misc_feature 6..15: note = DNA
gggaaaggaaactctgggat

SEQ ID NO: 579 - DNA, 20 bp, synthetic construct
  source 1..20: mol_type = other DNA
  modified_base 1: mod_base = OTHER; note = 2'-O-methyladenosine-3'-phosphorothioate
  modified_base 2: mod_base = OTHER; note = 2'-O-methyladenosine-3'-phosphorothioate
  modified_base 3: mod_base = OTHER; note = 2'-O-methyluridine-3'-phosphorothioate
  modified_base 4: mod_base = OTHER; note = 2'-O-methyladenosine-3'-phosphorothioate
  modified_base 5: mod_base = OTHER; note = 2'-O-methyluridine-3'-phosphorothioate
  modified_base 6: mod_base = OTHER; note = 2'-deoxyguanosine-3'-phosphorothioate
  modified_base 7: mod_base = OTHER; note = 2'-deoxyguanosine-3'-phosphorothioate
  modified_base 8: mod_base = OTHER; note = 5'-methyl-deoxycytidine-3'-phosphorothioate
  modified_base 9: mod_base = OTHER; note = 5'-methyl-deoxycytidine-3'-phosphorothioate
  modified_base 10: mod_base = OTHER; note = 2'-deoxyadenosine-3'-phosphorothioate
  modified_base 11: mod_base = OTHER; note = 2'-deoxyadenosine-3'-phosphorothioate
  modified_base 12: mod_base = OTHER; note = 2'-deoxyguanosine-3'-phosphorothioate
  modified_base 13: mod_base = OTHER; note = 2'-deoxyadenosine-3'-phosphorothioate
  modified_base 14: mod_base = OTHER; note = 2'-deoxyguanosine-3'-phosphorothioate
  modified_base 15: mod_base = OTHER; note = 2'-deoxyguanosine-3'-phosphorothioate
  modified_base 16: mod_base = OTHER; note = 2'-O-methylguanosine-3'-phosphorothioate
  modified_base 17: mod_base = OTHER; note = 2'-O-methyladenosine-3'-phosphorothioate
  modified_base 18: mod_base = OTHER; note = 2'-O-methyladenosine-3'-phosphorothioate
  modified_base 19: mod_base = OTHER; note = 2'-O-methyladenosine-3'-phosphorothioate
  modified_base 20: mod_base = OTHER; note = 2'-O-methylguanosine
  misc_feature 1..5: note = RNA
  misc_feature 16..20: note = RNA
  misc_feature 6..15: note = DNA
aatatggccaagagggaaag

SEQ ID NO: 580 - DNA, 20 bp, synthetic construct
  source 1..20: mol_type = other DNA
  modified_base 1: mod_base = OTHER; note = 2'-O-methyladenosine-3'-phosphorothioate
  modified_base 2: mod_base = OTHER; note = 2'-O-methyluridine-3'-phosphorothioate
  modified_base 3: mod_base = OTHER; note = 2'-O-methyluridine-3'-phosphorothioate
  modified_base 4: mod_base = OTHER; note = 2'-O-methylguanosine-3'-phosphorothioate
  modified_base 5: mod_base = OTHER; note = 2'-O-methyladenosine-3'-phosphorothioate
  modified_base 6: mod_base = OTHER; note = 5'-methyl-deoxycytidine-3'-phosphorothioate
  modified_base 7: mod_base = OTHER; note = 2'-deoxyadenosine-3'-phosphorothioate
  modified_base 8: mod_base = OTHER; note = 5'-methyl-deoxycytidine-3'-phosphorothioate
  modified_base 9: mod_base = OTHER; note = 5'-methyl-deoxycytidine-3'-phosphorothioate
  modified_base 10: mod_base = OTHER; note = 2'-deoxyadenosine-3'-phosphorothioate
  modified_base 11: mod_base = OTHER; note = 2'-deoxyguanosine-3'-phosphorothioate
  modified_base 12: mod_base = OTHER; note = 2'-deoxyadenosine-3'-phosphorothioate
  modified_base 13: mod_base = OTHER; note = 2'-deoxyadenosine-3'-phosphorothioate
  modified_base 14: mod_base = OTHER; note = 2'-deoxythymidine-3'-phosphorothioate
  modified_base 15: mod_base = OTHER; note = 2'-deoxyadenosine-3'-phosphorothioate
  modified_base 16: mod_base = OTHER; note = 2'-O-methyluridine-3'-phosphorothioate
  modified_base 17: mod_base = OTHER; note = 2'-O-methylguanosine-3'-phosphorothioate
  modified_base 18: mod_base = OTHER; note = 2'-O-methylguanosine-3'-phosphorothioate
  modified_base 19: mod_base = OTHER; note = 2'-O-methylcytidine-3'-phosphorothioate
  modified_base 20: mod_base = OTHER; note = 2'-O-methylcytidine
  misc_feature 1..5: note = RNA
  misc_feature 16..20: note = RNA
  misc_feature 6..15: note = DNA
attgacaccagaatatggcc

SEQ ID NO: 581 - DNA, 20 bp, synthetic construct
  source 1..20: mol_type = other DNA
  modified_base 1: mod_base = OTHER; note = 2'-O-methyladenosine-3'-phosphorothioate
  modified_base 2: mod_base = OTHER; note = 2'-O-methylcytidine-3'-phosphorothioate
  modified_base 3: mod_base = OTHER; note = 2'-O-methyluridine-3'-phosphorothioate
  modified_base 4: mod_base = OTHER; note = 2'-O-methylcytidine-3'-phosphorothioate
  modified_base 5: mod_base = OTHER; note = 2'-O-methylcytidine-3'-phosphorothioate
  modified_base 6: mod_base = OTHER; note = 2'-deoxythymidine-3'-phosphorothioate
  modified_base 7: mod_base = OTHER; note = 2'-deoxythymidine-3'-phosphorothioate
  modified_base 8: mod_base = OTHER; note = 2'-deoxyguanosine-3'-phosphorothioate
  modified_base 9: mod_base = OTHER; note = 2'-deoxythymidine-3'-phosphorothioate
  modified_base 10: mod_base = OTHER; note = 5'-methyl-deoxycytidine-3'-phosphorothioate
  modified_base 11: mod_base = OTHER; note = 2'-deoxyadenosine-3'-phosphorothioate
  modified_base 12: mod_base = OTHER; note = 2'-deoxythymidine-3'-phosphorothioate
  modified_base 13: mod_base = OTHER; note = 2'-deoxythymidine-3'-phosphorothioate
  modified_base 14: mod_base = OTHER; note = 2'-deoxyguanosine-3'-phosphorothioate
  modified_base 15: mod_base = OTHER; note = 2'-deoxyadenosine-3'-phosphorothioate
  modified_base 16: mod_base = OTHER; note = 2'-O-methylcytidine-3'-phosphorothioate
  modified_base 17: mod_base = OTHER; note = 2'-O-methyladenosine-3'-phosphorothioate
  modified_base 18: mod_base = OTHER; note = 2'-O-methylcytidine-3'-phosphorothioate
  modified_base 19: mod_base = OTHER; note = 2'-O-methylcytidine-3'-phosphorothioate
  modified_base 20: mod_base = OTHER; note = 2'-O-methyladenosine
  misc_feature 1..5: note = RNA
  misc_feature 16..20: note = RNA
  misc_feature 6..15: note = DNA
actccttgtcattgacacca

SEQ ID NO: 582 - DNA, 20 bp, synthetic construct
  source 1..20: mol_type = other DNA
  modified_base 1: mod_base = OTHER; note = 2'-O-methyladenosine-3'-phosphorothioate
  modified_base 2: mod_base = OTHER; note = 2'-O-methyladenosine-3'-phosphorothioate
  modified_base 3: mod_base = OTHER; note = 2'-O-methylguanosine-3'-phosphorothioate
  modified_base 4: mod_base = OTHER; note = 2'-O-methylcytidine-3'-phosphorothioate
  modified_base 5: mod_base = OTHER; note = 2'-O-methylcytidine-3'-phosphorothioate
  modified_base 6: mod_base = OTHER; note = 2'-deoxyadenosine-3'-phosphorothioate
  modified_base 7: mod_base = OTHER; note = 2'-deoxyadenosine-3'-phosphorothioate
  modified_base 8: mod_base = OTHER; note = 2'-deoxyguanosine-3'-phosphorothioate
  modified_base 9: mod_base = OTHER; note = 2'-deoxyguanosine-3'-phosphorothioate
  modified_base 10: mod_base = OTHER; note = 2'-deoxythymidine-3'-phosphorothioate
  modified_base 11: mod_base = OTHER; note = 2'-deoxyadenosine-3'-phosphorothioate
  modified_base 12: mod_base = OTHER; note = 5'-methyl-deoxycytidine-3'-phosphorothioate
  modified_base 13: mod_base = OTHER; note = 2'-deoxythymidine-3'-phosphorothioate
  modified_base 14: mod_base = OTHER; note = 5'-methyl-deoxycytidine-3'-phosphorothioate
  modified_base 15: mod_base = OTHER; note = 5'-methyl-deoxycytidine-3'-phosphorothioate
  modified_base 16: mod_base = OTHER; note = 2'-O-methyluridine-3'-phosphorothioate
  modified_base 17: mod_base = OTHER; note = 2'-O-methyluridine-3'-phosphorothioate
  modified_base 18: mod_base = OTHER; note = 2'-O-methylguanosine-3'-phosphorothioate
  modified_base 19: mod_base = OTHER; note = 2'-O-methyluridine-3'-phosphorothioate
  modified_base 20: mod_base = OTHER; note = 2'-O-methylcytidine
  misc_feature 1..5: note = RNA
  misc_feature 16..20: note = RNA
  misc_feature 6..15: note = DNA
aagccaaggtactccttgtc

SEQ ID NO: 583 - DNA, 20 bp, synthetic construct
  source 1..20: mol_type = other DNA
  modified_base 1: mod_base = OTHER; note = 2'-O-methyluridine-3'-phosphorothioate
  modified_base 2: mod_base = OTHER; note = 2'-O-methylguanosine-3'-phosphorothioate
  modified_base 3: mod_base = OTHER; note = 2'-O-methyladenosine-3'-phosphorothioate
  modified_base 4: mod_base = OTHER; note = 2'-O-methylcytidine-3'-phosphorothioate
  modified_base 5: mod_base = OTHER; note = 2'-O-methyladenosine-3'-phosphorothioate
  modified_base 6: mod_base = OTHER; note = 2'-deoxythymidine-3'-phosphorothioate
  modified_base 7: mod_base = OTHER; note = 2'-deoxyguanosine-3'-phosphorothioate
  modified_base 8: mod_base = OTHER; note = 2'-deoxythymidine-3'-phosphorothioate
  modified_base 9: mod_base = OTHER; note = 2'-deoxyguanosine-3'-phosphorothioate
  modified_base 10: mod_base = OTHER; note = 2'-deoxyguanosine-3'-phosphorothioate
  modified_base 11: mod_base = OTHER; note = 5'-methyl-deoxycytidine-3'-phosphorothioate
  modified_base 12: mod_base = OTHER; note = 2'-deoxyadenosine-3'-phosphorothioate
  modified_base 13: mod_base = OTHER; note = 2'-deoxyadenosine-3'-phosphorothioate
  modified_base 14: mod_base = OTHER; note = 2'-deoxyadenosine-3'-phosphorothioate
  modified_base 15: mod_base = OTHER; note = 2'-deoxyguanosine-3'-phosphorothioate
  modified_base 16: mod_base = OTHER; note = 2'-O-methylcytidine-3'-phosphorothioate
  modified_base 17: mod_base = OTHER; note = 2'-O-methylcytidine-3'-phosphorothioate
  modified_base 18: mod_base = OTHER; note = 2'-O-methyladenosine-3'-phosphorothioate
  modified_base 19: mod_base = OTHER; note = 2'-O-methyladenosine-3'-phosphorothioate
  modified_base 20: mod_base = OTHER; note = 2'-O-methylguanosine
  misc_feature 1..5: note = RNA
  misc_feature 16..20: note = RNA
  misc_feature 6..15: note = DNA
tgacatgtggcaaagccaag

SEQ ID NO: 584 - DNA, 20 bp, synthetic construct
  source 1..20: mol_type = other DNA
  modified_base 1: mod_base = OTHER; note = 2'-O-methyluridine-3'-phosphorothioate
  modified_base 2: mod_base = OTHER; note = 2'-O-methylcytidine-3'-phosphorothioate
  modified_base 3: mod_base = OTHER; note = 2'-O-methyluridine-3'-phosphorothioate
  modified_base 4: mod_base = OTHER; note = 2'-O-methyluridine-3'-phosphorothioate
  modified_base 5: mod_base = OTHER; note = 2'-O-methylcytidine-3'-phosphorothioate
  modified_base 6: mod_base = OTHER; note = 2'-deoxyadenosine-3'-phosphorothioate
  modified_base 7: mod_base = OTHER; note = 2'-deoxyguanosine-3'-phosphorothioate
  modified_base 8: mod_base = OTHER; note = 5'-methyl-deoxycytidine-3'-phosphorothioate
  modified_base 9: mod_base = OTHER; note = 5'-methyl-deoxycytidine-3'-phosphorothioate
  modified_base 10: mod_base = OTHER; note = 2'-deoxythymidine-3'-phosphorothioate
  modified_base 11: mod_base = OTHER; note = 2'-deoxythymidine-3'-phosphorothioate
  modified_base 12: mod_base = OTHER; note = 2'-deoxyguanosine-3'-phosphorothioate
  modified_base 13: mod_base = OTHER; note = 2'-deoxyadenosine-3'-phosphorothioate
  modified_base 14: mod_base = OTHER; note = 5'-methyl-deoxycytidine-3'-phosphorothioate
  modified_base 15: mod_base = OTHER; note = 2'-deoxyadenosine-3'-phosphorothioate
  modified_base 16: mod_base = OTHER; note = 2'-O-methyluridine-3'-phosphorothioate
  modified_base 17: mod_base = OTHER; note = 2'-O-methylguanosine-3'-phosphorothioate
  modified_base 18: mod_base = OTHER; note = 2'-O-methyluridine-3'-phosphorothioate
  modified_base 19: mod_base = OTHER; note = 2'-O-methylguanosine-3'-phosphorothioate
  modified_base 20: mod_base = OTHER; note = 2'-O-methylguanosine
  misc_feature 1..5: note = RNA
  misc_feature 16..20: note = RNA
  misc_feature 6..15: note = DNA
tcttcagccttgacatgtgg

SEQ ID NO: 585 - DNA, 20 bp, synthetic construct
  source 1..20: mol_type = other DNA
  modified_base 1: mod_base = OTHER; note = 2'-O-methylguanosine-3'-phosphorothioate
  modified_base 2: mod_base = OTHER; note = 2'-O-methylguanosine-3'-phosphorothioate
  modified_base 3: mod_base = OTHER; note = 2'-O-methyladenosine-3'-phosphorothioate
  modified_base 4: mod_base = OTHER; note = 2'-O-methylguanosine-3'-phosphorothioate
  modified_base 5: mod_base = OTHER; note = 2'-O-methyladenosine-3'-phosphorothioate
  modified_base 6: mod_base = OTHER; note = 5'-methyl-deoxycytidine-3'-phosphorothioate
  modified_base 7: mod_base = OTHER; note = 2'-deoxyadenosine-3'-phosphorothioate
  modified_base 8: mod_base = OTHER; note = 5'-methyl-deoxycytidine-3'-phosphorothioate
  modified_base 9: mod_base = OTHER; note = 2'-deoxythymidine-3'-phosphorothioate
  modified_base 10: mod_base = OTHER; note = 2'-deoxyguanosine-3'-phosphorothioate
  modified_base 11: mod_base = OTHER; note = 2'-deoxythymidine-3'-phosphorothioate
  modified_base 12: mod_base = OTHER; note = 2'-deoxythymidine-3'-phosphorothioate
  modified_base 13: mod_base = OTHER; note = 2'-deoxythymidine-3'-phosphorothioate
  modified_base 14: mod_base = OTHER; note = 5'-methyl-deoxycytidine-3'-phosphorothioate
  modified_base 15: mod_base = OTHER; note = 2'-deoxythymidine-3'-phosphorothioate
  modified_base 16: mod_base = OTHER; note = 2'-O-methyluridine-3'-phosphorothioate
  modified_base 17: mod_base = OTHER; note = 2'-O-methylcytidine-3'-phosphorothioate
  modified_base 18: mod_base = OTHER; note = 2'-O-methyladenosine-3'-phosphorothioate
  modified_base 19: mod_base = OTHER; note = 2'-O-methylguanosine-3'-phosphorothioate
  modified_base 20: mod_base = OTHER; note = 2'-O-methylcytidine
  misc_feature 1..5: note = RNA
  misc_feature 16..20: note = RNA
  misc_feature 6..15: note = DNA
ggagacactgtttcttcagc

SEQ ID NO: 586 - DNA, 20 bp, synthetic construct
  source 1..20: mol_type = other DNA
  modified_base 1: mod_base = OTHER; note = 2'-O-methyladenosine-3'-phosphorothioate
  modified_base 2: mod_base = OTHER; note = 2'-O-methylguanosine-3'-phosphorothioate
  modified_base 3: mod_base = OTHER; note = 2'-O-methylguanosine-3'-phosphorothioate
  modified_base 4: mod_base = OTHER; note = 2'-O-methyladenosine-3'-phosphorothioate
  modified_base 5: mod_base = OTHER; note = 2'-O-methylguanosine-3'-phosphorothioate
  modified_base 6: mod_base = OTHER; note = 5'-methyl-deoxycytidine-3'-phosphorothioate
  modified_base 7: mod_base = OTHER; note = 2'-deoxythymidine-3'-phosphorothioate
  modified_base 8: mod_base = OTHER; note = 5'-methyl-deoxycytidine-3'-phosphorothioate
  modified_base 9: mod_base = OTHER; note = 2'-deoxythymidine-3'-phosphorothioate
  modified_base 10: mod_base = OTHER; note = 2'-deoxyguanosine-3'-phosphorothioate
  modified_base 11: mod_base = OTHER; note = 2'-deoxythymidine-3'-phosphorothioate
  modified_base 12: mod_base = OTHER; note = 2'-deoxythymidine-3'-phosphorothioate
  modified_base 13: mod_base = OTHER; note = 2'-deoxyguanosine-3'-phosphorothioate
  modified_base 14: mod_base = OTHER; note = 2'-deoxyguanosine-3'-phosphorothioate
  modified_base 15: mod_base = OTHER; note = 2'-deoxyadenosine-3'-phosphorothioate
  modified_base 16: mod_base = OTHER; note = 2'-O-methylguanosine-3'-phosphorothioate
  modified_base 17: mod_base = OTHER; note = 2'-O-methyladenosine-3'-phosphorothioate
  modified_base 18: mod_base = OTHER; note = 2'-O-methylcytidine-3'-phosphorothioate
  modified_base 19: mod_base = OTHER; note = 2'-O-methyladenosine-3'-phosphorothioate
  modified_base 20: mod_base = OTHER; note = 2'-O-methylcytidine
  misc_feature 1..5: note = RNA
  misc_feature 16..20: note = RNA
  misc_feature 6..15: note = DNA
aggagctctgttggagacac

SEQ ID NO: 587 - DNA, 20 bp, synthetic construct
  source 1..20: mol_type = other DNA
  modified_base 1: mod_base = OTHER; note = 2'-O-methyladenosine-3'-phosphorothioate
  modified_base 2: mod_base = OTHER; note = 2'-O-methylguanosine-3'-phosphorothioate
  modified_base 3: mod_base = OTHER; note = 2'-O-methyladenosine-3'-phosphorothioate
  modified_base 4: mod_base = OTHER; note = 2'-O-methyluridine-3'-phosphorothioate
  modified_base 5: mod_base = OTHER; note = 2'-O-methyladenosine-3'-phosphorothioate
  modified_base 6: mod_base = OTHER; note = 2'-deoxyadenosine-3'-phosphorothioate
  modified_base 7: mod_base = OTHER; note = 5'-methyl-deoxycytidine-3'-phosphorothioate
  modified_base 8: mod_base = OTHER; note = 2'-deoxyadenosine-3'-phosphorothioate
  modified_base 9: mod_base = OTHER; note = 5'-methyl-deoxycytidine-3'-phosphorothioate
  modified_base 10: mod_base = OTHER; note = 2'-deoxyadenosine-3'-phosphorothioate
  modified_base 11: mod_base = OTHER; note = 2'-deoxyadenosine-3'-phosphorothioate
  modified_base 12: mod_base = OTHER; note = 2'-deoxyguanosine-3'-phosphorothioate
  modified_base 13: mod_base = OTHER; note = 2'-deoxyguanosine-3'-phosphorothioate
  modified_base 14: mod_base = OTHER; note = 2'-deoxyadenosine-3'-phosphorothioate
  modified_base 15: mod_base = OTHER; note = 2'-deoxyguanosine-3'-phosphorothioate
  modified_base 16: mod_base = OTHER; note = 2'-O-methylcytidine-3'-phosphorothioate
  modified_base 17: mod_base = OTHER; note = 2'-O-methyluridine-3'-phosphorothioate
  modified_base 18: mod_base = OTHER; note = 2'-O-methylcytidine-3'-phosphorothioate
  modified_base 19: mod_base = OTHER; note = 2'-O-methyluridine-3'-phosphorothioate
  modified_base 20: mod_base = OTHER; note = 2'-O-methylguanosine
  misc_feature 1..5: note = RNA
  misc_feature 16..20: note = RNA
  misc_feature 6..15: note = DNA
agataacacaaggagctctg

SEQ ID NO: 588 - DNA, 20 bp, synthetic construct
  source 1..20: mol_type = other DNA
  modified_base 1: mod_base = OTHER; note = 2'-O-methyladenosine-3'-phosphorothioate
  modified_base 2: mod_base = OTHER; note = 2'-O-methylcytidine-3'-phosphorothioate
  modified_base 3: mod_base = OTHER; note = 2'-O-methyladenosine-3'-phosphorothioate
  modified_base 4: mod_base = OTHER; note = 2'-O-methyluridine-3'-phosphorothioate
  modified_base 5: mod_base = OTHER; note = 2'-O-methylguanosine-3'-phosphorothioate
  modified_base 6: mod_base = OTHER; note = 2'-deoxythymidine-3'-phosphorothioate
  modified_base 7: mod_base = OTHER; note = 2'-deoxyadenosine-3'-phosphorothioate
  modified_base 8: mod_base = OTHER; note = 5'-methyl-deoxycytidine-3'-phosphorothioate
  modified_base 9: mod_base = OTHER; note = 2'-deoxyadenosine-3'-phosphorothioate
  modified_base 10: mod_base = OTHER; note = 2'-deoxyadenosine-3'-phosphorothioate
  modified_base 11: mod_base = OTHER; note = 2'-deoxyadenosine-3'-phosphorothioate
  modified_base 12: mod_base = OTHER; note = 5'-methyl-deoxycytidine-3'-phosphorothioate
  modified_base 13: mod_base = OTHER; note = 2'-deoxyadenosine-3'-phosphorothioate
  modified_base 14: mod_base = OTHER; note = 2'-deoxyguanosine-3'-phosphorothioate
  modified_base 15: mod_base = OTHER; note = 2'-deoxyadenosine-3'-phosphorothioate
  modified_base 16: mod_base = OTHER; note = 2'-O-methyluridine-3'-phosphorothioate
  modified_base 17: mod_base = OTHER; note = 2'-O-methyladenosine-3'-phosphorothioate
  modified_base 18: mod_base = OTHER; note = 2'-O-methyladenosine-3'-phosphorothioate
  modified_base 19: mod_base = OTHER; note = 2'-O-methylcytidine-3'-phosphorothioate
  modified_base 20: mod_base = OTHER; note = 2'-O-methyladenosine
  misc_feature 1..5: note = RNA
  misc_feature 16..20: note = RNA
  misc_feature 6..15: note = DNA
acatgtacaaacagataaca

SEQ ID NO: 589 - DNA, 20 bp, synthetic construct
  source 1..20: mol_type = other DNA
  modified_base 1: mod_base = OTHER; note = 2'-O-methyluridine-3'-phosphorothioate
  modified_base 2: mod_base = OTHER; note = 2'-O-methyladenosine-3'-phosphorothioate
  modified_base 3: mod_base = OTHER; note = 2'-O-methylcytidine-3'-phosphorothioate
  modified_base 4: mod_base = OTHER; note = 2'-O-methyladenosine-3'-phosphorothioate
  modified_base 5: mod_base = OTHER; note = 2'-O-methyladenosine-3'-phosphorothioate
  modified_base 6: mod_base = OTHER; note = 2'-deoxyadenosine-3'-phosphorothioate
  modified_base 7: mod_base = OTHER; note = 2'-deoxythymidine-3'-phosphorothioate
  modified_base 8: mod_base = OTHER; note = 2'-deoxyguanosine-3'-phosphorothioate
  modified_base 9: mod_base = OTHER; note = 5'-methyl-deoxycytidine-3'-phosphorothioate
  modified_base 10: mod_base = OTHER; note = 2'-deoxyadenosine-3'-phosphorothioate
  modified_base 11: mod_base = OTHER; note = 5'-methyl-deoxycytidine-3'-phosphorothioate
  modified_base 12: mod_base = OTHER; note = 2'-deoxyadenosine-3'-phosphorothioate
  modified_base 13: mod_base = OTHER; note = 2'-deoxythymidine-3'-phosphorothioate
  modified_base 14: mod_base = OTHER; note = 2'-deoxyguanosine-3'-phosphorothioate
  modified_base 15: mod_base = OTHER; note = 2'-deoxythymidine-3'-phosphorothioate
  modified_base 16: mod_base = OTHER; note = 2'-O-methyladenosine-3'-phosphorothioate
  modified_base 17: mod_base = OTHER; note = 2'-O-methylcytidine-3'-phosphorothioate
  modified_base 18: mod_base = OTHER; note = 2'-O-methyladenosine-3'-phosphorothioate
  modified_base 19: mod_base = OTHER; note = 2'-O-methyladenosine-3'-phosphorothioate
  modified_base 20: mod_base = OTHER; note = 2'-O-methyladenosine
  misc_feature 1..5: note = RNA
  misc_feature 16..20: note = RNA
  misc_feature 6..15: note = DNA
tacaaatgcacatgtacaaa

SEQ ID NO: 590 - DNA, 20 bp, synthetic construct
  source 1..20: mol_type = other DNA
  modified_base 1: mod_base = OTHER; note = 2'-O-methyladenosine-3'-phosphorothioate
  modified_base 2: mod_base = OTHER; note = 2'-O-methylcytidine-3'-phosphorothioate
  modified_base 3: mod_base = OTHER; note = 2'-O-methyladenosine-3'-phosphorothioate
  modified_base 4: mod_base = OTHER; note = 2'-O-methylcytidine-3'-phosphorothioate
  modified_base 5: mod_base = OTHER; note = 2'-O-methylcytidine-3'-phosphorothioate
  modified_base 6: mod_base = OTHER; note = 2'-deoxyadenosine-3'-phosphorothioate
  modified_base 7: mod_base = OTHER; note = 2'-deoxyadenosine-3'-phosphorothioate
  modified_base 8: mod_base = OTHER; note = 2'-deoxythymidine-3'-phosphorothioate
  modified_base 9: mod_base = OTHER; note = 2'-deoxythymidine-3'-phosphorothioate
  modified_base 10: mod_base = OTHER; note = 2'-deoxyadenosine-3'-phosphorothioate
  modified_base 11: mod_base = OTHER; note = 5'-methyl-deoxycytidine-3'-phosphorothioate
  modified_base 12: mod_base = OTHER; note = 2'-deoxythymidine-3'-phosphorothioate
  modified_base 13: mod_base = OTHER; note = 2'-deoxyguanosine-3'-phosphorothioate
  modified_base 14: mod_base = OTHER; note = 2'-deoxythymidine-3'-phosphorothioate
  modified_base 15: mod_base = OTHER; note = 2'-deoxyadenosine-3'-phosphorothioate
  modified_base 16: mod_base = OTHER; note = 2'-O-methylcytidine-3'-phosphorothioate
  modified_base 17: mod_base = OTHER; note = 2'-O-methyladenosine-3'-phosphorothioate
  modified_base 18: mod_base = OTHER; note = 2'-O-methyladenosine-3'-phosphorothioate
  modified_base 19: mod_base = OTHER; note = 2'-O-methyladenosine-3'-phosphorothioate
  modified_base 20: mod_base = OTHER; note = 2'-O-methyluridine
  misc_feature 1..5: note = RNA
  misc_feature 16..20: note = RNA
  misc_feature 6..15: note = DNA
acaccaattactgtacaaat

SEQ ID NO: 591 - DNA, 20 bp, synthetic construct
  source 1..20: mol_type = other DNA
  modified_base 1: mod_base = OTHER; note = 2'-O-methyladenosine-3'-phosphorothioate
  modified_base 2: mod_base = OTHER; note = 2'-O-methyladenosine-3'-phosphorothioate
  modified_base 3: mod_base = OTHER; note = 2'-O-methylcytidine-3'-phosphorothioate
  modified_base 4: mod_base = OTHER; note = 2'-O-methyladenosine-3'-phosphorothioate
  modified_base 5: mod_base = OTHER; note = 2'-O-methylcytidine-3'-phosphorothioate
  modified_base 6: mod_base = OTHER; note = 2'-deoxythymidine-3'-phosphorothioate
  modified_base 7: mod_base = OTHER; note = 2'-deoxyguanosine-3'-phosphorothioate
  modified_base 8: mod_base = OTHER; note = 2'-deoxythymidine-3'-phosphorothioate
  modified_base 9: mod_base = OTHER; note = 5'-methyl-deoxycytidine-3'-phosphorothioate
  modified_base 10: mod_base = OTHER; note = 2'-deoxyadenosine-3'-phosphorothioate
  modified_base 11: mod_base = OTHER; note = 5'-methyl-deoxycytidine-3'-phosphorothioate
  modified_base 12: mod_base = OTHER; note = 2'-deoxyadenosine-3'-phosphorothioate
  modified_base 13: mod_base = OTHER; note = 5'-methyl-deoxycytidine-3'-phosphorothioate
  modified_base 14: mod_base = OTHER; note = 5'-methyl-deoxycytidine-3'-phosphorothioate
  modified_base 15: mod_base = OTHER; note = 2'-deoxyadenosine-3'-phosphorothioate
  modified_base 16: mod_base = OTHER; note = 2'-O-methyladenosine-3'-phosphorothioate
  modified_base 17: mod_base = OTHER; note = 2'-O-methyluridine-3'-phosphorothioate
  modified_base 18: mod_base = OTHER; note = 2'-O-methyluridine-3'-phosphorothioate
  modified_base 19: mod_base = OTHER; note = 2'-O-methyladenosine-3'-phosphorothioate
  modified_base 20: mod_base = OTHER; note = 2'-O-methylcytidine
  misc_feature 1..5: note = RNA
  misc_feature 16..20: note = RNA
  misc_feature 6..15: note = DNA
aacactgtcacaccaattac

SEQ ID NO: 592 - DNA, 20 bp, synthetic construct
  source 1..20: mol_type = other DNA
  modified_base 1: mod_base = OTHER; note = 2'-O-methyladenosine-3'-phosphorothioate
  modified_base 2: mod_base = OTHER; note = 2'-O-methyluridine-3'-phosphorothioate
  modified_base 3: mod_base = OTHER; note = 2'-O-methyluridine-3'-phosphorothioate
  modified_base 4: mod_base = OTHER; note = 2'-O-methylcytidine-3'-phosphorothioate
  modified_base 5: mod_base = OTHER; note = 2'-O-methyladenosine-3'-phosphorothioate
  modified_base 6: mod_base = OTHER; note = 5'-methyl-deoxycytidine-3'-phosphorothioate
  modified_base 7: mod_base = OTHER; note = 2'-deoxyadenosine-3'-phosphorothioate
  modified_base 8: mod_base = OTHER; note = 5'-methyl-deoxycytidine-3'-phosphorothioate
  modified_base 9: mod_base = OTHER; note = 2'-deoxyadenosine-3'-phosphorothioate
  modified_base 10: mod_base = OTHER; note = 2'-deoxyadenosine-3'-phosphorothioate
  modified_base 11: mod_base = OTHER; note = 2'-deoxyadenosine-3'-phosphorothioate
  modified_base 12: mod_base = OTHER; note = 2'-deoxyguanosine-3'-phosphorothioate
  modified_base 13: mod_base = OTHER; note = 2'-deoxyadenosine-3'-phosphorothioate
  modified_base 14: mod_base = OTHER; note = 2'-deoxyadenosine-3'-phosphorothioate
  modified_base 15: mod_base = OTHER; note = 5'-methyl-deoxycytidine-3'-phosphorothioate
  modified_base 16: mod_base = OTHER; note = 2'-O-methyladenosine-3'-phosphorothioate
  modified_base 17: mod_base = OTHER; note = 2'-O-methylcytidine-3'-phosphorothioate
  modified_base 18: mod_base = OTHER; note = 2'-O-methyluridine-3'-phosphorothioate
  modified_base 19: mod_base = OTHER; note = 2'-O-methylguanosine-3'-phosphorothioate
  modified_base 20: mod_base = OTHER; note = 2'-O-methyluridine
  misc_feature 1..5: note = RNA
  misc_feature 16..20: note = RNA
  misc_feature 6..15: note = DNA
attcacacaaagaacactgt

SEQ ID NO: 593 - DNA, 20 bp, synthetic construct
  source 1..20: mol_type = other DNA
  modified_base 1: mod_base = OTHER; note = 2'-O-methylcytidine-3'-phosphorothioate
  modified_base 2: mod_base = OTHER; note = 2'-O-methyluridine-3'-phosphorothioate
  modified_base 3: mod_base = OTHER; note = 2'-O-methyluridine-3'-phosphorothioate
  modified_base 4: mod_base = OTHER; note = 2'-O-methylguanosine-3'-phosphorothioate
  modified_base 5: mod_base = OTHER; note = 2'-O-methylcytidine-3'-phosphorothioate
  modified_base 6: mod_base = OTHER; note = 5'-methyl-deoxycytidine-3'-phosphorothioate
  modified_base 7: mod_base = OTHER; note = 2'-deoxythymidine-3'-phosphorothioate
  modified_base 8: mod_base = OTHER; note = 2'-deoxyguanosine-3'-phosphorothioate
  modified_base 9: mod_base = OTHER; note = 2'-deoxythymidine-3'-phosphorothioate
  modified_base 10: mod_base = OTHER; note = 2'-deoxyadenosine-3'-phosphorothioate
  modified_base 11: mod_base = OTHER; note = 2'-deoxyadenosine-3'-phosphorothioate
  modified_base 12: mod_base = OTHER; note = 2'-deoxythymidine-3'-phosphorothioate
  modified_base 13: mod_base = OTHER; note = 2'-deoxythymidine-3'-phosphorothioate
  modified_base 14: mod_base = OTHER; note = 5'-methyl-deoxycytidine-3'-phosphorothioate
  modified_base 15: mod_base = OTHER; note = 2'-deoxyadenosine-3'-phosphorothioate
  modified_base 16: mod_base = OTHER; note = 2'-O-methylcytidine-3'-phosphorothioate
  modified_base 17: mod_base = OTHER; note = 2'-O-methyladenosine-3'-phosphorothioate
  modified_base 18: mod_base = OTHER; note = 2'-O-methylcytidine-3'-phosphorothioate
  modified_base 19: mod_base = OTHER; note = 2'-O-methyladenosine-3'-phosphorothioate
  modified_base 20: mod_base = OTHER; note = 2'-O-methyladenosine
  misc_feature 1..5: note = RNA
  misc_feature 16..20: note = RNA
  misc_feature 6..15: note = DNA
cttgcctgtaattcacacaa

SEQ ID NO: 594 - DNA, 20 bp, synthetic construct
  source 1..20: mol_type = other DNA
  modified_base 1: mod_base = OTHER; note = 2'-O-methyluridine-3'-phosphorothioate
  modified_base 2: mod_base = OTHER; note = 2'-O-methylcytidine-3'-phosphorothioate
  modified_base 3: mod_base = OTHER; note = 2'-O-methyladenosine-3'-phosphorothioate
  modified_base 4: mod_base = OTHER; note = 2'-O-methylguanosine-3'-phosphorothioate
  modified_base 5: mod_base = OTHER; note = 2'-O-methylcytidine-3'-phosphorothioate
  modified_base 6: mod_base = OTHER; note = 5'-methyl-deoxycytidine-3'-phosphorothioate
  modified_base 7: mod_base = OTHER; note = 2'-deoxyadenosine-3'-phosphorothioate
  modified_base 8: mod_base = OTHER; note = 5'-methyl-deoxycytidine-3'-phosphorothioate
  modified_base 9: mod_base = OTHER; note = 2'-deoxyadenosine-3'-phosphorothioate
  modified_base 10: mod_base = OTHER; note = 2'-deoxyadenosine-3'-phosphorothioate
  modified_base 11: mod_base = OTHER; note = 2'-deoxythymidine-3'-phosphorothioate
  modified_base 12: mod_base = OTHER; note = 2'-deoxythymidine-3'-phosphorothioate
  modified_base 13: mod_base = OTHER; note = 5'-methyl-deoxycytidine-3'-phosphorothioate
  modified_base 14: mod_base = OTHER; note = 2'-deoxythymidine-3'-phosphorothioate
  modified_base 15: mod_base = OTHER; note = 2'-deoxythymidine-3'-phosphorothioate
  modified_base 16: mod_base = OTHER; note = 2'-O-methylguanosine-3'-phosphorothioate
  modified_base 17: mod_base = OTHER; note = 2'-O-methylcytidine-3'-phosphorothioate
  modified_base 18: mod_base = OTHER; note = 2'-O-methylcytidine-3'-phosphorothioate
  modified_base 19: mod_base = OTHER; note = 2'-O-methyluridine-3'-phosphorothioate
  modified_base 20: mod_base = OTHER; note = 2'-O-methylguanosine
  misc_feature 1..5: note = RNA
  misc_feature 16..20: note = RNA
  misc_feature 6..15: note = DNA
tcagccacaattcttgcctg

SEQ ID NO: 595 - DNA, 20 bp, synthetic construct
  source 1..20: mol_type = other DNA
  modified_base 1: mod_base = OTHER; note = 2'-O-methyluridine-3'-phosphorothioate
  modified_base 2: mod_base = OTHER; note = 2'-O-methyladenosine-3'-phosphorothioate
  modified_base 3: mod_base = OTHER; note = 2'-O-methyluridine-3'-phosphorothioate
  modified_base 4: mod_base = OTHER; note = 2'-O-methylguanosine-3'-phosphorothioate
  modified_base 5: mod_base = OTHER; note = 2'-O-methyluridine-3'-phosphorothioate
  modified_base 6: mod_base = OTHER; note = 2'-deoxyguanosine-3'-phosphorothioate
  modified_base 7: mod_base = OTHER; note = 5'-methyl-deoxycytidine-3'-phosphorothioate
  modified_base 8: mod_base = OTHER; note = 5'-methyl-deoxycytidine-3'-phosphorothioate
  modified_base 9: mod_base = OTHER; note = 2'-deoxythymidine-3'-phosphorothioate
  modified_base 10: mod_base = OTHER; note = 2'-deoxythymidine-3'-phosphorothioate
  modified_base 11: mod_base = OTHER; note = 2'-deoxyguanosine-3'-phosphorothioate
  modified_base 12: mod_base = OTHER; note = 5'-methyl-deoxycytidine-3'-phosphorothioate
  modified_base 13: mod_base = OTHER; note = 2'-deoxythymidine-3'-phosphorothioate
  modified_base 14: mod_base = OTHER; note = 5'-methyl-deoxycytidine-3'-phosphorothioate
  modified_base 15: mod_base = OTHER; note = 2'-deoxyadenosine-3'-phosphorothioate
  modified_base 16: mod_base = OTHER; note = 2'-O-methylguanosine-3'-phosphorothioate
  modified_base 17: mod_base = OTHER; note = 2'-O-methylcytidine-3'-phosphorothioate
  modified_base 18: mod_base = OTHER; note = 2'-O-methylcytidine-3'-phosphorothioate
  modified_base 19: mod_base = OTHER; note = 2'-O-methyladenosine-3'-phosphorothioate
  modified_base 20: mod_base = OTHER; note = 2'-O-methylcytidine
  misc_feature 1..5: note = RNA
  misc_feature 16..20: note = RNA
  misc_feature 6..15: note = DNA
tatgtgccttgctcagccac

SEQ ID NO: 596 - DNA, 20 bp, synthetic construct
  source 1..20: mol_type = other DNA
  modified_base 1: mod_base = OTHER; note = 2'-O-methylcytidine-3'-phosphorothioate
  modified_base 2: mod_base = OTHER; note = 2'-O-methyluridine-3'-phosphorothioate
  modified_base 3: mod_base = OTHER; note = 2'-O-methylguanosine-3'-phosphorothioate
  modified_base 4: mod_base = OTHER; note = 2'-O-methyladenosine-3'-phosphorothioate
  modified_base 5: mod_base = OTHER; note = 2'-O-methylguanosine-3'-phosphorothioate
  modified_base 6: mod_base = OTHER; note = 2'-deoxythymidine-3'-phosphorothioate
  modified_base 7: mod_base = OTHER; note = 2'-deoxyadenosine-3'-phosphorothioate
  modified_base 8: mod_base = OTHER; note = 2'-deoxyguanosine-3'-phosphorothioate
  modified_base 9: mod_base = OTHER; note = 2'-deoxyadenosine-3'-phosphorothioate
  modified_base 10: mod_base = OTHER; note = 5'-methyl-deoxycytidine-3'-phosphorothioate
  modified_base 11: mod_base = OTHER; note = 2'-deoxythymidine-3'-phosphorothioate
  modified_base 12: mod_base = OTHER; note = 2'-deoxyadenosine-3'-phosphorothioate
  modified_base 13: mod_base = OTHER; note = 2'-deoxythymidine-3'-phosphorothioate
  modified_base 14: mod_base = OTHER; note = 2'-deoxyguanosine-3'-phosphorothioate
  modified_base 15: mod_base = OTHER; note = 2'-deoxythymidine-3'-phosphorothioate
  modified_base 16: mod_base = OTHER; note = 2'-O-methylguanosine-3'-phosphorothioate
  modified_base 17: mod_base = OTHER; note = 2'-O-methylcytidine-3'-phosphorothioate
  modified_base 18: mod_base = OTHER; note = 2'-O-methylcytidine-3'-phosphorothioate
  modified_base 19: mod_base = OTHER; note = 2'-O-methyluridine-3'-phosphorothioate
  modified_base 20: mod_base = OTHER; note = 2'-O-methyluridine
  misc_feature 1..5: note = RNA
  misc_feature 16..20: note = RNA
  misc_feature 6..15: note = DNA
ctgagtagactatgtgcctt

SEQ ID NO: 597 - DNA, 20 bp, synthetic construct
  source 1..20: mol_type = other DNA
  modified_base 1: mod_base = OTHER; note = 2'-O-methylcytidine-3'-phosphorothioate
  modified_base 2: mod_base = OTHER; note = 2'-O-methyluridine-3'-phosphorothioate
  modified_base 3: mod_base = OTHER; note = 2'-O-methyluridine-3'-phosphorothioate
  modified_base 4: mod_base = OTHER; note = 2'-O-methyladenosine-3'-phosphorothioate
  modified_base 5: mod_base = OTHER; note = 2'-O-methylguanosine-3'-phosphorothioate
  modified_base 6: mod_base = OTHER; note = 2'-deoxyguanosine-3'-phosphorothioate
  modified_base 7: mod_base = OTHER; note = 2'-deoxyadenosine-3'-phosphorothioate
  modified_base 8: mod_base = OTHER; note = 2'-deoxyadenosine-3'-phosphorothioate
  modified_base 9: mod_base = OTHER; note = 2'-deoxythymidine-3'-phosphorothioate
  modified_base 10: mod_base = OTHER; note = 2'-deoxyadenosine-3'-phosphorothioate
  modified_base 11: mod_base = OTHER; note = 2'-deoxyguanosine-3'-phosphorothioate
  modified_base 12: mod_base = OTHER; note = 2'-deoxyadenosine-3'-phosphorothioate
  modified_base 13: mod_base = OTHER; note = 5'-methyl-deoxycytidine-3'-phosphorothioate
  modified_base 14: mod_base = OTHER; note = 2'-deoxythymidine-3'-phosphorothioate
  modified_base 15: mod_base = OTHER; note = 2'-deoxyguanosine-3'-phosphorothioate
  modified_base 16: mod_base = OTHER; note = 2'-O-methyladenosine-3'-phosphorothioate
  modified_base 17: mod_base = OTHER; note = 2'-O-methylguanosine-3'-phosphorothioate
  modified_base 18: mod_base = OTHER; note = 2'-O-methyluridine-3'-phosphorothioate
  modified_base 19: mod_base = OTHER; note = 2'-O-methyladenosine-3'-phosphorothioate
  modified_base 20: mod_base = OTHER; note = 2'-O-methylguanosine
  misc_feature 1..5: note = RNA
  misc_feature 16..20: note = RNA
  misc_feature 6..15: note = DNA
cttaggaatagactgagtag

SEQ ID NO: 598 - DNA, 20 bp, synthetic construct
  source 1..20: mol_type = other DNA
  modified_base 1: mod_base = OTHER; note = 2'-O-methyladenosine-3'-phosphorothioate
  modified_base 2: mod_base = OTHER; note = 2'-O-methylguanosine-3'-phosphorothioate
  modified_base 3: mod_base = OTHER; note = 2'-O-methylguanosine-3'-phosphorothioate
  modified_base 4: mod_base = OTHER; note = 2'-O-methyladenosine-3'-phosphorothioate
  modified_base 5: mod_base = OTHER; note = 2'-O-methylguanosine-3'-phosphorothioate
  modified_base 6: mod_base = OTHER; note = 2'-deoxythymidine-3'-phosphorothioate
  modified_base 7: mod_base = OTHER; note = 2'-deoxythymidine-3'-phosphorothioate
  modified_base 8: mod_base = OTHER; note = 2'-deoxyadenosine-3'-phosphorothioate
  modified_base 9: mod_base = OTHER; note = 2'-deoxyguanosine-3'-phosphorothioate
  modified_base 10: mod_base = OTHER; note = 2'-deoxyguanosine-3'-phosphorothioate
  modified_base 11: mod_base = OTHER; note = 2'-deoxyadenosine-3'-phosphorothioate
  modified_base 12: mod_base = OTHER; note = 5'-methyl-deoxycytidine-3'-phosphorothioate
  modified_base 13: mod_base = OTHER; note = 2'-deoxythymidine-3'-phosphorothioate
  modified_base 14: mod_base = OTHER; note = 2'-deoxythymidine-3'-phosphorothioate
  modified_base 15: mod_base = OTHER; note = 2'-deoxyadenosine-3'-phosphorothioate
  modified_base 16: mod_base = OTHER; note = 2'-O-methylguanosine-3'-phosphorothioate
  modified_base 17: mod_base = OTHER; note = 2'-O-methylguanosine-3'-phosphorothioate
  modified_base 18: mod_base = OTHER; note = 2'-O-methyladenosine-3'-phosphorothioate
  modified_base 19: mod_base = OTHER; note = 2'-O-methyladenosine-3'-phosphorothioate
  modified_base 20: mod_base = OTHER; note = 2'-O-methyluridine
  misc_feature 1..5: note = RNA
  misc_feature 16..20: note = RNA
  misc_feature 6..15: note = DNA
aggagttaggacttaggaat

SEQ ID NO: 599 - DNA, 20 bp, synthetic construct
  source 1..20: mol_type = other DNA
  modified_base 1: mod_base = OTHER; note = 2'-O-methyladenosine-3'-phosphorothioate
  modified_base 2: mod_base = OTHER; note = 2'-O-methylcytidine-3'-phosphorothioate
  modified_base 3: mod_base = OTHER; note = 2'-O-methyladenosine-3'-phosphorothioate
  modified_base 4: mod_base = OTHER; note = 2'-O-methylcytidine-3'-phosphorothioate
  modified_base 5: mod_base = OTHER; note = 2'-O-methylcytidine-3'-phosphorothioate
  modified_base 6: mod_base = OTHER; note = 2'-deoxyadenosine-3'-phosphorothioate
  modified_base 7: mod_base = OTHER; note = 5'-methyl-deoxycytidine-3'-phosphorothioate
  modified_base 8: mod_base = OTHER; note = 2'-deoxyadenosine-3'-phosphorothioate
  modified_base 9: mod_base = OTHER; note = 2'-deoxyadenosine-3'-phosphorothioate
  modified_base 10: mod_base = OTHER; note = 2'-deoxyguanosine-3'-phosphorothioate
  modified_base 11: mod_base = OTHER; note = 2'-deoxyguanosine-3'-phosphorothioate
  modified_base 12: mod_base = OTHER; note = 2'-deoxyadenosine-3'-phosphorothioate
  modified_base 13: mod_base = OTHER; note = 2'-deoxyguanosine-3'-phosphorothioate
  modified_base 14: mod_base = OTHER; note = 2'-deoxyguanosine-3'-phosphorothioate
  modified_base 15: mod_base = OTHER; note = 2'-deoxyadenosine-3'-phosphorothioate
  modified_base 16: mod_base = OTHER; note = 2'-O-methylguanosine-3'-phosphorothioate
  modified_base 17: mod_base = OTHER; note = 2'-O-methyluridine-3'-phosphorothioate
  modified_base 18: mod_base = OTHER; note = 2'-O-methyluridine-3'-phosphorothioate
  modified_base 19: mod_base = OTHER; note = 2'-O-methyladenosine-3'-phosphorothioate
  modified_base 20: mod_base = OTHER; note = 2'-O-methylguanosine
  misc_feature 1..5: note = RNA
  misc_feature 16..20: note = RNA
  misc_feature 6..15: note = DNA
acaccacaaggaggagttag

SEQ ID NO: 600 - DNA, 20 bp, synthetic construct
  source 1..20: mol_type = other DNA
  modified_base 1: mod_base = OTHER; note = 2'-O-methyluridine-3'-phosphorothioate
  modified_base 2: mod_base = OTHER; note = 2'-O-methyladenosine-3'-phosphorothioate
  modified_base 3: mod_base = OTHER; note = 2'-O-methylcytidine-3'-phosphorothioate
  modified_base 4: mod_base = OTHER; note = 2'-O-methyladenosine-3'-phosphorothioate
  modified_base 5: mod_base = OTHER; note = 2'-O-methyladenosine-3'-phosphorothioate
  modified_base 6: mod_base = OTHER; note = 2'-deoxyadenosine-3'-phosphorothioate
  modified_base 7: mod_base = OTHER; note = 2'-deoxythymidine-3'-phosphorothioate
  modified_base 8: mod_base = OTHER; note = 5'-methyl-deoxycytidine-3'-phosphorothioate
  modified_base 9: mod_base = OTHER; note = 5'-methyl-deoxycytidine-3'-phosphorothioate
  modified_base 10: mod_base = OTHER; note = 2'-deoxyadenosine-3'-phosphorothioate
  modified_base 11: mod_base = OTHER; note = 2'-deoxyadenosine-3'-phosphorothioate
  modified_base 12: mod_base = OTHER; note = 5'-methyl-deoxycytidine-3'-phosphorothioate
  modified_base 13: mod_base = OTHER; note = 2'-deoxyadenosine-3'-phosphorothioate
  modified_base 14: mod_base = OTHER; note = 5'-methyl-deoxycytidine-3'-phosphorothioate
  modified_base 15: mod_base = OTHER; note = 5'-methyl-deoxycytidine-3'-phosphorothioate
  modified_base 16: mod_base = OTHER; note = 2'-O-methyladenosine-3'-phosphorothioate
  modified_base 17: mod_base = OTHER; note = 2'-O-methylcytidine-3'-phosphorothioate
  modified_base 18: mod_base = OTHER; note = 2'-O-methyladenosine-3'-phosphorothioate
  modified_base 19: mod_base = OTHER; note = 2'-O-methyladenosine-3'-phosphorothioate
  modified_base 20: mod_base = OTHER; note = 2'-O-methylguanosine
  misc_feature 1..5: note = RNA
  misc_feature 16..20: note = RNA
  misc_feature 6..15: note = DNA
tacaaatccaacaccacaag

SEQ ID NO: 601 - DNA, 20 bp, synthetic construct
  source 1..20: mol_type = other DNA
  modified_base 1: mod_base = OTHER; note = 2'-O-methyladenosine-3'-phosphorothioate
  modified_base 2: mod_base = OTHER; note = 2'-O-methyluridine-3'-phosphorothioate
  modified_base 3: mod_base = OTHER; note = 2'-O-methyladenosine-3'-phosphorothioate
  modified_base 4: mod_base = OTHER; note = 2'-O-methyladenosine-3'-phosphorothioate
  modified_base 5: mod_base = OTHER; note = 2'-O-methyladenosine-3'-phosphorothioate
  modified_base 6: mod_base = OTHER; note = 2'-deoxyguanosine-3'-phosphorothioate
  modified_base 7: mod_base = OTHER; note = 2'-deoxythymidine-3'-phosphorothioate
  modified_base 8: mod_base = OTHER; note = 2'-deoxyguanosine-3'-phosphorothioate
  modified_base 9: mod_base = OTHER; note = 5'-methyl-deoxycytidine-3'-phosphorothioate
  modified_base 10: mod_base = OTHER; note = 5'-methyl-deoxycytidine-3'-phosphorothioate
  modified_base 11: mod_base = OTHER; note = 2'-deoxythymidine-3'-phosphorothioate
  modified_base 12: mod_base = OTHER; note = 2'-deoxythymidine-3'-phosphorothioate
  modified_base 13: mod_base = OTHER; note = 2'-deoxyadenosine-3'-phosphorothioate
  modified_base 14: mod_base = OTHER; note = 5'-methyl-deoxycytidine-3'-phosphorothioate
  modified_base 15: mod_base = OTHER; note = 2'-deoxyadenosine-3'-phosphorothioate
  modified_base 16: mod_base = OTHER; note = 2'-O-methyladenosine-3'-phosphorothioate
  modified_base 17: mod_base = OTHER; note = 2'-O-methyladenosine-3'-phosphorothioate
  modified_base 18: mod_base = OTHER; note = 2'-O-methyluridine-3'-phosphorothioate
  modified_base 19: mod_base = OTHER; note = 2'-O-methylcytidine-3'-phosphorothioate
  modified_base 20: mod_base = OTHER; note = 2'-O-methylcytidine
  misc_feature 1..5: note = RNA
  misc_feature 16..20: note = RNA
  misc_feature 6..15: note = DNA
ataaagtgccttacaaatcc

SEQ ID NO: 602 - DNA, 20 bp, synthetic construct
  source 1..20: mol_type = other DNA
  modified_base 1: mod_base = OTHER; note = 2'-O-methyladenosine-3'-phosphorothioate
  modified_base 2: mod_base = OTHER; note = 2'-O-methylguanosine-3'-phosphorothioate
  modified_base 3: mod_base = OTHER; note = 2'-O-methyladenosine-3'-phosphorothioate
  modified_base 4: mod_base = OTHER; note = 2'-O-methylcytidine-3'-phosphorothioate
  modified_base 5: mod_base = OTHER; note = 2'-O-methyladenosine-3'-phosphorothioate
  modified_base 6: mod_base = OTHER; note = 2'-deoxyadenosine-3'-phosphorothioate
  modified_base 7: mod_base = OTHER; note = 2'-deoxyadenosine-3'-phosphorothioate
  modified_base 8: mod_base = OTHER; note = 2'-deoxyadenosine-3'-phosphorothioate
  modified_base 9: mod_base = OTHER; note = 2'-deoxyguanosine-3'-phosphorothioate
  modified_base 10: mod_base = OTHER; note = 2'-deoxyguanosine-3'-phosphorothioate
  modified_base 11: mod_base = OTHER; note = 2'-deoxyguanosine-3'-phosphorothioate
  modified_base 12: mod_base = OTHER; note = 2'-deoxyadenosine-3'-phosphorothioate
  modified_base 13: mod_base = OTHER; note = 2'-deoxythymidine-3'-phosphorothioate
  modified_base 14: mod_base = OTHER; note = 2'-deoxyadenosine-3'-phosphorothioate
  modified_base 15: mod_base = OTHER; note = 2'-deoxyadenosine-3'-phosphorothioate
  modified_base 16: mod_base = OTHER; note = 2'-O-methyladenosine-3'-phosphorothioate
  modified_base 17: mod_base = OTHER; note = 2'-O-methylguanosine-3'-phosphorothioate
  modified_base 18: mod_base = OTHER; note = 2'-O-methyluridine-3'-phosphorothioate
  modified_base 19: mod_base = OTHER; note = 2'-O-methylguanosine-3'-phosphorothioate
  modified_base 20: mod_base = OTHER; note = 2'-O-methylcytidine
  misc_feature 1..5: note = RNA
  misc_feature 16..20: note = RNA
  misc_feature 6..15: note = DNA
agacaaaagggataaagtgc

SEQ ID NO: 603 - DNA, 20 bp, synthetic construct
  source 1..20: mol_type = other DNA
  modified_base 1: mod_base = OTHER; note = 2'-O-methylguanosine-3'-phosphorothioate
  modified_base 2: mod_base = OTHER; note = 2'-O-methyladenosine-3'-phosphorothioate
  modified_base 3: mod_base = OTHER; note = 2'-O-methyluridine-3'-phosphorothioate
  modified_base 4: mod_base = OTHER; note = 2'-O-methylguanosine-3'-phosphorothioate
  modified_base 5: mod_base = OTHER; note = 2'-O-methyladenosine-3'-phosphorothioate
  modified_base 6: mod_base = OTHER; note = 2'-deoxyadenosine-3'-phosphorothioate
  modified_base 7: mod_base = OTHER; note = 2'-deoxyadenosine-3'-phosphorothioate
  modified_base 8: mod_base = OTHER; note = 5'-methyl-deoxycytidine-3'-phosphorothioate
  modified_base 9: mod_base = OTHER; note = 2'-deoxyadenosine-3'-phosphorothioate
  modified_base 10: mod_base = OTHER; note = 2'-deoxythymidine-3'-phosphorothioate
  modified_base 11: mod_base = OTHER; note = 2'-deoxyguanosine-3'-phosphorothioate
  modified_base 12: mod_base = OTHER; note = 2'-deoxyadenosine-3'-phosphorothioate
  modified_base 13: mod_base = OTHER; note = 2'-deoxyguanosine-3'-phosphorothioate
  modified_base 14: mod_base = OTHER; note = 2'-deoxyadenosine-3'-phosphorothioate
  modified_base 15: mod_base = OTHER; note = 5'-methyl-deoxycytidine-3'-phosphorothioate
  modified_base 16: mod_base = OTHER; note = 2'-O-methyladenosine-3'-phosphorothioate
  modified_base 17: mod_base = OTHER; note = 2'-O-methyladenosine-3'-phosphorothioate
  modified_base 18: mod_base = OTHER; note = 2'-O-methyladenosine-3'-phosphorothioate
  modified_base 19: mod_base = OTHER; note = 2'-O-methyladenosine-3'-phosphorothioate
  modified_base 20: mod_base = OTHER; note = 2'-O-methylguanosine
  misc_feature 1..5: note = RNA
  misc_feature 16..20: note = RNA
  misc_feature 6..15: note = DNA
gatgaaacatgagacaaaag

SEQ ID NO: 604 - DNA, 20 bp, synthetic construct
  source 1..20: mol_type = other DNA
  modified_base 1: mod_base = OTHER; note = 2'-O-methyluridine-3'-phosphorothioate
  modified_base 2: mod_base = OTHER; note = 2'-O-methyladenosine-3'-phosphorothioate
  modified_base 3: mod_base = OTHER; note = 2'-O-methyluridine-3'-phosphorothioate
  modified_base 4: mod_base = OTHER; note = 2'-O-methylguanosine-3'-phosphorothioate
  modified_base 5: mod_base = OTHER; note = 2'-O-methylcytidine-3'-phosphorothioate
  modified_base 6: mod_base = OTHER; note = 5'-methyl-deoxycytidine-3'-phosphorothioate
  modified_base 7: mod_base = OTHER; note = 2'-deoxyadenosine-3'-phosphorothioate
  modified_base 8: mod_base = OTHER; note = 2'-deoxythymidine-3'-phosphorothioate
  modified_base 9: mod_base = OTHER; note = 2'-deoxythymidine-3'-phosphorothioate
  modified_base 10: mod_base = OTHER; note = 2'-deoxythymidine-3'-phosphorothioate
  modified_base 11: mod_base = OTHER; note = 2'-deoxyadenosine-3'-phosphorothioate
  modified_base 12: mod_base = OTHER; note = 5'-methyl-deoxycytidine-3'-phosphorothioate
  modified_base 13: mod_base = OTHER; note = 2'-deoxyguanosine-3'-phosphorothioate
  modified_base 14: mod_base = OTHER; note = 2'-deoxyadenosine-3'-phosphorothioate
  modified_base 15: mod_base = OTHER; note = 2'-deoxythymidine-3'-phosphorothioate
  modified_base 16: mod_base = OTHER; note = 2'-O-methylguanosine-3'-phosphorothioate
  modified_base 17: mod_base = OTHER; note = 2'-O-methyladenosine-3'-phosphorothioate
  modified_base 18: mod_base = OTHER; note = 2'-O-methyladenosine-3'-phosphorothioate
  modified_base 19: mod_base = OTHER; note = 2'-O-methyladenosine-3'-phosphorothioate
  modified_base 20: mod_base = OTHER; note = 2'-O-methylcytidine
  misc_feature 1..5: note = RNA
  misc_feature 16..20: note = RNA
  misc_feature 6..15: note = DNA
tatgccatttacgatgaaac

SEQ ID NO: 605 - DNA, 20 bp, synthetic construct
  source 1..20: mol_type = other DNA
  modified_base 1: mod_base = OTHER; note = 2'-O-methyladenosine-3'-phosphorothioate
  modified_base 2: mod_base = OTHER; note = 2'-O-methyluridine-3'-phosphorothioate
  modified_base 3: mod_base = OTHER; note = 2'-O-methylcytidine-3'-phosphorothioate
  modified_base 4: mod_base = OTHER; note = 2'-O-methyluridine-3'-phosphorothioate
  modified_base 5: mod_base = OTHER; note = 2'-O-methylcytidine-3'-phosphorothioate
  modified_base 6: mod_base = OTHER; note = 2'-deoxythymidine-3'-phosphorothioate
  modified_base 7: mod_base = OTHER; note = 2'-deoxyguanosine-3'-phosphorothioate
  modified_base 8: mod_base = OTHER; note = 5'-methyl-deoxycytidine-3'-phosphorothioate
  modified_base 9: mod_base = OTHER; note = 5'-methyl-deoxycytidine-3'-phosphorothioate
  modified_base 10: mod_base = OTHER; note = 2'-deoxythymidine-3'-phosphorothioate
  modified_base 11: mod_base = OTHER; note = 2'-deoxyadenosine-3'-phosphorothioate
  modified_base 12: mod_base = OTHER; note = 2'-deoxythymidine-3'-phosphorothioate
  modified_base 13: mod_base = OTHER; note = 2'-deoxyguanosine-3'-phosphorothioate
  modified_base 14: mod_base = OTHER; note = 5'-methyl-deoxycytidine-3'-phosphorothioate
  modified_base 15: mod_base = OTHER; note = 5'-methyl-deoxycytidine-3'-phosphorothioate
  modified_base 16: mod_base = OTHER; note = 2'-O-methyladenosine-3'-phosphorothioate
  modified_base 17: mod_base = OTHER; note = 2'-O-methyluridine-3'-phosphorothioate
  modified_base 18: mod_base = OTHER; note = 2'-O-methyluridine-3'-phosphorothioate
  modified_base 19: mod_base = OTHER; note = 2'-O-methyluridine-3'-phosphorothioate
  modified_base 20: mod_base = OTHER; note = 2'-O-methyladenosine
  misc_feature 1..5: note = RNA
  misc_feature 16..20: note = RNA
  misc_feature 6..15: note = DNA
atctctgcctatgccattta

SEQ ID NO: 606 - DNA, 20 bp, synthetic construct
  source 1..20: mol_type = other DNA
  modified_base 1: mod_base = OTHER; note = 2'-O-methyladenosine-3'-phosphorothioate
  modified_base 2: mod_base = OTHER; note = 2'-O-methylguanosine-3'-phosphorothioate
  modified_base 3: mod_base = OTHER; note = 2'-O-methyladenosine-3'-phosphorothioate
  modified_base 4: mod_base = OTHER; note = 2'-O-methyladenosine-3'-phosphorothioate
  modified_base 5: mod_base = OTHER; note = 2'-O-methyluridine-3'-phosphorothioate
  modified_base 6: mod_base = OTHER; note = 2'-deoxythymidine-3'-phosphorothioate
  modified_base 7: mod_base = OTHER; note = 2'-deoxyadenosine-3'-phosphorothioate
  modified_base 8: mod_base = OTHER; note = 2'-deoxyguanosine-3'-phosphorothioate
  modified_base 9: mod_base = OTHER; note = 2'-deoxyguanosine-3'-phosphorothioate
  modified_base 10: mod_base = OTHER; note = 2'-deoxythymidine-3'-phosphorothioate
  modified_base 11: mod_base = OTHER; note = 2'-deoxyadenosine-3'-phosphorothioate
  modified_base 12: mod_base = OTHER; note = 2'-deoxythymidine-3'-phosphorothioate
  modified_base 13: mod_base = OTHER; note = 5'-methyl-deoxycytidine-3'-phosphorothioate
  modified_base 14: mod_base = OTHER; note = 2'-deoxyadenosine-3'-phosphorothioate
  modified_base 15: mod_base = OTHER; note = 2'-deoxythymidine-3'-phosphorothioate
  modified_base 16: mod_base = OTHER; note = 2'-O-methylcytidine-3'-phosphorothioate
  modified_base 17: mod_base = OTHER; note = 2'-O-methyluridine-3'-phosphorothioate
  modified_base 18: mod_base = OTHER; note = 2'-O-methylcytidine-3'-phosphorothioate
  modified_base 19: mod_base = OTHER; note = 2'-O-methyluridine-3'-phosphorothioate
  modified_base 20: mod_base = OTHER; note = 2'-O-methylguanosine
  misc_feature 1..5: note = RNA
  misc_feature 16..20: note = RNA
  misc_feature 6..15: note = DNA
agaattaggtatcatctctg

SEQ ID NO: 607 - DNA, 20 bp, synthetic construct
  source 1..20: mol_type = other DNA
  modified_base 1: mod_base = OTHER; note = 2'-O-methyladenosine-3'-phosphorothioate
  modified_base 2: mod_base = OTHER; note = 2'-O-methyladenosine-3'-phosphorothioate
  modified_base 3: mod_base = OTHER; note = 2'-O-methyluridine-3'-phosphorothioate
  modified_base 4: mod_base = OTHER; note = 2'-O-methylcytidine-3'-phosphorothioate
  modified_base 5: mod_base = OTHER; note = 2'-O-methyladenosine-3'-phosphorothioate
  modified_base 6: mod_base = OTHER; note = 2'-deoxyadenosine-3'-phosphorothioate
  modified_base 7: mod_base = OTHER; note = 2'-deoxyadenosine-3'-phosphorothioate
  modified_base 8: mod_base = OTHER; note = 2'-deoxythymidine-3'-phosphorothioate
  modified_base 9: mod_base = OTHER; note = 2'-deoxyguanosine-3'-phosphorothioate
  modified_base 10: mod_base = OTHER; note = 5'-methyl-deoxycytidine-3'-phosphorothioate
  modified_base 11: mod_base = OTHER; note = 2'-deoxyadenosine-3'-phosphorothioate
  modified_base 12: mod_base = OTHER; note = 2'-deoxyguanosine-3'-phosphorothioate
  modified_base 13: mod_base = OTHER; note = 2'-deoxyadenosine-3'-phosphorothioate
  modified_base 14: mod_base = OTHER; note = 2'-deoxyadenosine-3'-phosphorothioate
  modified_base 15: mod_base = OTHER; note = 2'-deoxythymidine-3'-phosphorothioate
  modified_base 16: mod_base = OTHER; note = 2'-O-methyluridine-3'-phosphorothioate
  modified_base 17: mod_base = OTHER; note = 2'-O-methyladenosine-3'-phosphorothioate
  modified_base 18: mod_base = OTHER; note = 2'-O-methylguanosine-3'-phosphorothioate
  modified_base 19: mod_base = OTHER; note = 2'-O-methylguanosine-3'-phosphorothioate
  modified_base 20: mod_base = OTHER; note = 2'-O-methyluridine
  misc_feature 1..5: note = RNA
  misc_feature 16..20: note = RNA
  misc_feature 6..15: note = DNA
aatcaaatgcagaattaggt

SEQ ID NO: 608 - DNA, 20 bp, synthetic construct
  source 1..20: mol_type = other DNA
  modified_base 1: mod_base = OTHER; note = 2'-O-methyladenosine-3'-phosphorothioate
  modified_base 2: mod_base = OTHER; note = 2'-O-methylcytidine-3'-phosphorothioate
  modified_base 3: mod_base = OTHER; note = 2'-O-methyladenosine-3'-phosphorothioate
  modified_base 4: mod_base = OTHER; note = 2'-O-methyladenosine-3'-phosphorothioate
  modified_base 5: mod_base = OTHER; note = 2'-O-methyladenosine-3'-phosphorothioate
  modified_base 6: mod_base = OTHER; note = 2'-deoxyadenosine-3'-phosphorothioate
  modified_base 7: mod_base = OTHER; note = 2'-deoxyadenosine-3'-phosphorothioate
  modified_base 8: mod_base = OTHER; note = 2'-deoxyguanosine-3'-phosphorothioate
  modified_base 9: mod_base = OTHER; note = 2'-deoxythymidine-3'-phosphorothioate
  modified_base 10: mod_base = OTHER; note = 2'-deoxyguanosine-3'-phosphorothioate
  modified_base 11: mod_base = OTHER; note = 2'-deoxyadenosine-3'-phosphorothioate
  modified_base 12: mod_base = OTHER; note = 5'-methyl-deoxycytidine-3'-phosphorothioate
  modified_base 13: mod_base = OTHER; note = 2'-deoxyadenosine-3'-phosphorothioate
  modified_base 14: mod_base = OTHER; note = 2'-deoxyadenosine-3'-phosphorothioate
  modified_base 15: mod_base = OTHER; note = 2'-deoxythymidine-3'-phosphorothioate
  modified_base 16: mod_base = OTHER; note = 2'-O-methylcytidine-3'-phosphorothioate
  modified_base 17: mod_base = OTHER; note = 2'-O-methyladenosine-3'-phosphorothioate
  modified_base 18: mod_base = OTHER; note = 2'-O-methyladenosine-3'-phosphorothioate
  modified_base 19: mod_base = OTHER; note = 2'-O-methyladenosine-3'-phosphorothioate
  modified_base 20: mod_base = OTHER; note = 2'-O-methyluridine
  misc_feature 1..5: note = RNA
  misc_feature 16..20: note = RNA
  misc_feature 6..15: note = DNA
acaaaaagtgacaatcaaat

SEQ ID NO: 609 - DNA, 20 bp, synthetic construct
  source 1..20: mol_type = other DNA
  modified_base 1: mod_base = OTHER; note = 2'-O-methyladenosine-3'-phosphorothioate
  modified_base 2: mod_base = OTHER; note = 2'-O-methyladenosine-3'-phosphorothioate
  modified_base 3: mod_base = OTHER; note = 2'-O-methyluridine-3'-phosphorothioate
  modified_base 4: mod_base = OTHER; note = 2'-O-methylguanosine-3'-phosphorothioate
  modified_base 5: mod_base = OTHER; note = 2'-O-methylcytidine-3'-phosphorothioate
  modified_base 6: mod_base = OTHER; note = 2'-deoxyadenosine-3'-phosphorothioate
  modified_base 7: mod_base = OTHER; note = 2'-deoxyguanosine-3'-phosphorothioate
  modified_base 8: mod_base = OTHER; note = 2'-deoxyguanosine-3'-phosphorothioate
  modified_base 9: mod_base = OTHER; note = 2'-deoxythymidine-3'-phosphorothioate
  modified_base 10: mod_base = OTHER; note = 2'-deoxyadenosine-3'-phosphorothioate
  modified_base 11: mod_base = OTHER; note = 5'-methyl-deoxycytidine-3'-phosphorothioate
  modified_base 12: mod_base = OTHER; note = 2'-deoxyadenosine-3'-phosphorothioate
  modified_base 13: mod_base = OTHER; note = 2'-deoxyadenosine-3'-phosphorothioate
  modified_base 14: mod_base = OTHER; note = 2'-deoxyadenosine-3'-phosphorothioate
  modified_base 15: mod_base = OTHER; note = 2'-deoxyadenosine-3'-phosphorothioate
  modified_base 16: mod_base = OTHER; note = 2'-O-methyladenosine-3'-phosphorothioate
  modified_base 17: mod_base = OTHER; note = 2'-O-methylguanosine-3'-phosphorothioate
  modified_base 18: mod_base = OTHER; note = 2'-O-methyluridine-3'-phosphorothioate
  modified_base 19: mod_base = OTHER; note = 2'-O-methylguanosine-3'-phosphorothioate
  modified_base 20: mod_base = OTHER; note = 2'-O-methyladenosine
  misc_feature 1..5: note = RNA
  misc_feature 16..20: note = RNA
  misc_feature 6..15: note = DNA
aatgcaggtacaaaaagtga

SEQ ID NO: 610 - DNA, 20 bp, synthetic construct
  source 1..20: mol_type = other DNA
  modified_base 1: mod_base = OTHER; note = 2'-O-methyladenosine-3'-phosphorothioate
  modified_base 2: mod_base = OTHER; note = 2'-O-methyluridine-3'-phosphorothioate
  modified_base 3: mod_base = OTHER; note = 2'-O-methyluridine-3'-phosphorothioate
  modified_base 4: mod_base = OTHER; note = 2'-O-methyluridine-3'-phosphorothioate
  modified_base 5: mod_base = OTHER; note = 2'-O-methyluridine-3'-phosphorothioate
  modified_base 6: mod_base = OTHER; note = 2'-deoxyadenosine-3'-phosphorothioate
  modified_base 7: mod_base = OTHER; note = 2'-deoxythymidine-3'-phosphorothioate
  modified_base 8: mod_base = OTHER; note = 2'-deoxythymidine-3'-phosphorothioate
  modified_base 9: mod_base = OTHER; note = 2'-deoxyadenosine-3'-phosphorothioate
  modified_base 10: mod_base = OTHER; note = 2'-deoxyadenosine-3'-phosphorothioate
  modified_base 11: mod_base = OTHER; note = 2'-deoxyadenosine-3'-phosphorothioate
  modified_base 12: mod_base = OTHER; note = 2'-deoxythymidine-3'-phosphorothioate
  modified_base 13: mod_base = OTHER; note = 2'-deoxythymidine-3'-phosphorothioate
  modified_base 14: mod_base = OTHER; note = 2'-deoxyadenosine-3'-phosphorothioate
  modified_base 15: mod_base = OTHER; note = 2'-deoxyadenosine-3'-phosphorothioate
  modified_base 16: mod_base = OTHER; note = 2'-O-methyluridine-3'-phosphorothioate
  modified_base 17: mod_base = OTHER; note = 2'-O-methylguanosine-3'-phosphorothioate
  modified_base 18: mod_base = OTHER; note = 2'-O-methylcytidine-3'-phosphorothioate
  modified_base 19: mod_base = OTHER; note = 2'-O-methyladenosine-3'-phosphorothioate
  modified_base 20: mod_base = OTHER; note = 2'-O-methylguanosine
  misc_feature 1..5: note = RNA
  misc_feature 16..20: note = RNA
  misc_feature 6..15: note = DNA
attttattaaattaatgcag

SEQ ID NO: 611 - DNA, 20 bp, synthetic construct
  source 1..20: mol_type = other DNA
  modified_base 1: mod_base = OTHER; note = 2'-O-methyladenosine-3'-phosphorothioate
  modified_base 2: mod_base = OTHER; note = 2'-O-methyladenosine-3'-phosphorothioate
  modified_base 3: mod_base = OTHER; note = 2'-O-methyladenosine-3'-phosphorothioate
  modified_base 4: mod_base = OTHER; note = 2'-O-methyluridine-3'-phosphorothioate
  modified_base 5: mod_base = OTHER; note = 2'-O-methyladenosine-3'-phosphorothioate
  modified_base 6: mod_base = OTHER; note = 2'-deoxyadenosine-3'-phosphorothioate
  modified_base 7: mod_base = OTHER; note = 2'-deoxyguanosine-3'-phosphorothioate
  modified_base 8: mod_base = OTHER; note = 2'-deoxyadenosine-3'-phosphorothioate
  modified_base 9: mod_base = OTHER; note = 2'-deoxyadenosine-3'-phosphorothioate
  modified_base 10: mod_base = OTHER; note = 2'-deoxythymidine-3'-phosphorothioate
  modified_base 11: mod_base = OTHER; note = 2'-deoxyadenosine-3'-phosphorothioate
  modified_base 12: mod_base = OTHER; note = 2'-deoxythymidine-3'-phosphorothioate
  modified_base 13: mod_base = OTHER; note = 2'-deoxythymidine-3'-phosphorothioate
  modified_base 14: mod_base = OTHER; note = 2'-deoxythymidine-3'-phosphorothioate
  modified_base 15: mod_base = OTHER; note = 2'-deoxythymidine-3'-phosphorothioate
  modified_base 16: mod_base = OTHER; note = 2'-O-methyladenosine-3'-phosphorothioate
  modified_base 17: mod_base = OTHER; note = 2'-O-methyluridine-3'-phosphorothioate
  modified_base 18: mod_base = OTHER; note = 2'-O-methyluridine-3'-phosphorothioate
  modified_base 19: mod_base = OTHER; note = 2'-O-methyladenosine-3'-phosphorothioate
  modified_base 20: mod_base = OTHER; note = 2'-O-methyladenosine
  misc_feature 1..5: note = RNA
  misc_feature 16..20: note = RNA
  misc_feature 6..15: note = DNA
aaataagaatattttattaa

SEQ ID NO: 612 - DNA, 20 bp, synthetic construct
  source 1..20: mol_type = other DNA
  modified_base 1: mod_base = OTHER; note = 2'-O-methylguanosine-3'-phosphorothioate
  modified_base 2: mod_base = OTHER; note = 2'-O-methyluridine-3'-phosphorothioate
  modified_base 3: mod_base = OTHER; note = 2'-O-methyladenosine-3'-phosphorothioate
  modified_base 4: mod_base = OTHER; note = 2'-O-methyladenosine-3'-phosphorothioate
  modified_base 5: mod_base = OTHER; note = 2'-O-methylcytidine-3'-phosphorothioate
  modified_base 6: mod_base = OTHER; note = 2'-deoxyadenosine-3'-phosphorothioate
  modified_base 7: mod_base = OTHER; note = 2'-deoxyadenosine-3'-phosphorothioate
  modified_base 8: mod_base = OTHER; note = 2'-deoxyadenosine-3'-phosphorothioate
  modified_base 9: mod_base = OTHER; note = 2'-deoxyadenosine-3'-phosphorothioate
  modified_base 10: mod_base = OTHER; note = 2'-deoxythymidine-3'-phosphorothioate
  modified_base 11: mod_base = OTHER; note = 2'-deoxyadenosine-3'-phosphorothioate
  modified_base 12: mod_base = OTHER; note = 2'-deoxyadenosine-3'-phosphorothioate
  modified_base 13: mod_base = OTHER; note = 2'-deoxyadenosine-3'-phosphorothioate
  modified_base 14: mod_base = OTHER; note = 2'-deoxythymidine-3'-phosphorothioate
  modified_base 15: mod_base = OTHER; note = 2'-deoxyadenosine-3'-phosphorothioate
  modified_base 16: mod_base = OTHER; note = 2'-O-methyladenosine-3'-phosphorothioate
  modified_base 17: mod_base = OTHER; note = 2'-O-methylguanosine-3'-phosphorothioate
  modified_base 18: mod_base = OTHER; note = 2'-O-methyladenosine-3'-phosphorothioate
  modified_base 19: mod_base = OTHER; note = 2'-O-methyladenosine-3'-phosphorothioate
  modified_base 20: mod_base = OTHER; note = 2'-O-methyluridine
  misc_feature 1..5: note = RNA
  misc_feature 16..20: note = RNA
  misc_feature 6..15: note = DNA
gtaacaaaataaataagaat

SEQ ID NO: 613 - DNA, 20 bp, synthetic construct
  source 1..20: mol_type = other DNA
  modified_base 1: mod_base = OTHER; note = 2'-O-methyluridine-3'-phosphorothioate
  modified_base 2: mod_base = OTHER; note = 2'-O-methylguanosine-3'-phosphorothioate
  modified_base 3: mod_base = OTHER; note = 2'-O-methylguanosine-3'-phosphorothioate
  modified_base 4: mod_base = OTHER; note = 2'-O-methyluridine-3'-phosphorothioate
  modified_base 5: mod_base = OTHER; note = 2'-O-methylguanosine-3'-phosphorothioate
  modified_base 6: mod_base = OTHER; note = 2'-deoxythymidine-3'-phosphorothioate
  modified_base 7: mod_base = OTHER; note = 2'-deoxyadenosine-3'-phosphorothioate
  modified_base 8: mod_base = OTHER; note = 5'-methyl-deoxycytidine-3'-phosphorothioate
  modified_base 9: mod_base = OTHER; note = 5'-methyl-deoxycytidine-3'-phosphorothioate
  modified_base 10: mod_base = OTHER; note = 2'-deoxyadenosine-3'-phosphorothioate
  modified_base 11: mod_base = OTHER; note = 2'-deoxyadenosine-3'-phosphorothioate
  modified_base 12: mod_base = OTHER; note = 2'-deoxyguanosine-3'-phosphorothioate
  modified_base 13: mod_base = OTHER; note = 2'-deoxythymidine-3'-phosphorothioate
  modified_base 14: mod_base = OTHER; note = 2'-deoxyadenosine-3'-phosphorothioate
  modified_base 15: mod_base = OTHER; note = 2'-deoxyadenosine-3'-phosphorothioate
  modified_base 16: mod_base = OTHER; note = 2'-O-methylcytidine-3'-phosphorothioate
  modified_base 17: mod_base = OTHER; note = 2'-O-methyladenosine-3'-phosphorothioate
  modified_base 18: mod_base = OTHER; note = 2'-O-methyladenosine-3'-phosphorothioate
  modified_base 19: mod_base = OTHER; note = 2'-O-methyladenosine-3'-phosphorothioate
  modified_base 20: mod_base = OTHER; note = 2'-O-methyladenosine
  misc_feature 1..5: note = RNA
  misc_feature 16..20: note = RNA
  misc_feature 6..15: note = DNA
tggtgtaccaagtaacaaaa

SEQ ID NO: 614 - DNA, 20 bp, synthetic construct
  source 1..20: mol_type = other DNA
  modified_base 1: mod_base = OTHER; note = 2'-O-methyladenosine-3'-phosphorothioate
  modified_base 2: mod_base = OTHER; note = 2'-O-methyladenosine-3'-phosphorothioate
  modified_base 3: mod_base = OTHER; note = 2'-O-methyladenosine-3'-phosphorothioate
  modified_base 4: mod_base = OTHER; note = 2'-O-methyluridine-3'-phosphorothioate
  modified_base 5: mod_base = OTHER; note = 2'-O-methylguanosine-3'-phosphorothioate
  modified_base 6: mod_base = OTHER; note = 2'-deoxyguanosine-3'-phosphorothioate
  modified_base 7: mod_base = OTHER; note = 2'-deoxyadenosine-3'-phosphorothioate
  modified_base 8: mod_base = OTHER; note = 5'-methyl-deoxycytidine-3'-phosphorothioate
  modified_base 9: mod_base = OTHER; note = 2'-deoxyadenosine-3'-phosphorothioate
  modified_base 10: mod_base = OTHER; note = 2'-deoxythymidine-3'-phosphorothioate
  modified_base 11: mod_base = OTHER; note = 2'-deoxyguanosine-3'-phosphorothioate
  modified_base 12: mod_base = OTHER; note = 5'-methyl-deoxycytidine-3'-phosphorothioate
  modified_base 13: mod_base = OTHER; note = 2'-deoxythymidine-3'-phosphorothioate
  modified_base 14: mod_base = OTHER; note = 2'-deoxyguanosine-3'-phosphorothioate
  modified_base 15: mod_base = OTHER; note = 2'-deoxyguanosine-3'-phosphorothioate
  modified_base 16: mod_base = OTHER; note = 2'-O-methyluridine-3'-phosphorothioate
  modified_base 17: mod_base = OTHER; note = 2'-O-methylguanosine-3'-phosphorothioate
  modified_base 18: mod_base = OTHER; note = 2'-O-methyluridine-3'-phosphorothioate
  modified_base 19: mod_base = OTHER; note = 2'-O-methyladenosine-3'-phosphorothioate
  modified_base 20: mod_base = OTHER; note = 2'-O-methylcytidine
  misc_feature 1..5: note = RNA
  misc_feature 16..20: note = RNA
  misc_feature 6..15: note = DNA
aaatggacatgctggtgtac

SEQ ID NO: 615 - DNA, 20 bp, synthetic construct
  source 1..20: mol_type = other DNA
  modified_base 1: mod_base = OTHER; note = 2'-O-methyladenosine-3'-phosphorothioate
  modified_base 2: mod_base = OTHER; note = 2'-O-methyladenosine-3'-phosphorothioate
  modified_base 3: mod_base = OTHER; note = 2'-O-methyladenosine-3'-phosphorothioate
  modified_base 4: mod_base = OTHER; note = 2'-O-methyluridine-3'-phosphorothioate
  modified_base 5: mod_base = OTHER; note = 2'-O-methyladenosine-3'-phosphorothioate
  modified_base 6: mod_base = OTHER; note = 2'-deoxyadenosine-3'-phosphorothioate
  modified_base 7: mod_base = OTHER; note = 2'-deoxyadenosine-3'-phosphorothioate
  modified_base 8: mod_base = OTHER; note = 5'-methyl-deoxycytidine-3'-phosphorothioate
  modified_base 9: mod_base = OTHER; note = 2'-deoxyadenosine-3'-phosphorothioate
  modified_base 10: mod_base = OTHER; note = 2'-deoxyadenosine-3'-phosphorothioate
  modified_base 11: mod_base = OTHER; note = 2'-deoxyguanosine-3'-phosphorothioate
  modified_base 12: mod_base = OTHER; note = 2'-deoxyadenosine-3'-phosphorothioate
  modified_base 13: mod_base = OTHER; note = 2'-deoxyadenosine-3'-phosphorothioate
  modified_base 14: mod_base = OTHER; note = 2'-deoxyadenosine-3'-phosphorothioate
  modified_base 15: mod_base = OTHER; note = 2'-deoxyadenosine-3'-phosphorothioate
  modified_base 16: mod_base = OTHER; note = 2'-O-methyluridine-3'-phosphorothioate
  modified_base 17: mod_base = OTHER; note = 2'-O-methylguanosine-3'-phosphorothioate
  modified_base 18: mod_base = OTHER; note = 2'-O-methylguanosine-3'-phosphorothioate
  modified_base 19: mod_base = OTHER; note = 2'-O-methyladenosine-3'-phosphorothioate
  modified_base 20: mod_base = OTHER; note = 2'-O-methylcytidine
  misc_feature 1..5: note = RNA
  misc_feature 16..20: note = RNA
  misc_feature 6..15: note = DNA
aaataaacaagaaaatggac

SEQ ID NO: 616 - DNA, 20 bp, synthetic construct
  source 1..20: mol_type = other DNA
  modified_base 1: mod_base = OTHER; note = 2'-O-methyluridine-3'-phosphorothioate
  modified_base 2: mod_base = OTHER; note = 2'-O-methyluridine-3'-phosphorothioate
  modified_base 3: mod_base = OTHER; note = 2'-O-methyladenosine-3'-phosphorothioate
  modified_base 4: mod_base = OTHER; note = 2'-O-methyladenosine-3'-phosphorothioate
  modified_base 5: mod_base = OTHER; note = 2'-O-methyladenosine-3'-phosphorothioate
  modified_base 6: mod_base = OTHER; note = 5'-methyl-deoxycytidine-3'-phosphorothioate
  modified_base 7: mod_base = OTHER; note = 2'-deoxyadenosine-3'-phosphorothioate
  modified_base 8: mod_base = OTHER; note = 5'-methyl-deoxycytidine-3'-phosphorothioate
  modified_base 9: mod_base = OTHER; note = 2'-deoxyadenosine-3'-phosphorothioate
  modified_base 10: mod_base = OTHER; note = 2'-deoxyadenosine-3'-phosphorothioate
  modified_base 11: mod_base = OTHER; note = 2'-deoxyadenosine-3'-phosphorothioate
  modified_base 12: mod_base = OTHER; note = 2'-deoxyadenosine-3'-phosphorothioate
  modified_base 13: mod_base = OTHER; note = 2'-deoxythymidine-3'-phosphorothioate
  modified_base 14: mod_base = OTHER; note = 2'-deoxyadenosine-3'-phosphorothioate
  modified_base 15: mod_base = OTHER; note = 2'-deoxyadenosine-3'-phosphorothioate
  modified_base 16: mod_base = OTHER; note = 2'-O-methyladenosine-3'-phosphorothioate
  modified_base 17: mod_base = OTHER; note = 2'-O-methylcytidine-3'-phosphorothioate
  modified_base 18: mod_base = OTHER; note = 2'-O-methyladenosine-3'-phosphorothioate
  modified_base 19: mod_base = OTHER; note = 2'-O-methyladenosine-3'-phosphorothioate
  modified_base 20: mod_base = OTHER; note = 2'-O-methylguanosine
  misc_feature 1..5: note = RNA
  misc_feature 16..20: note = RNA
  misc_feature 6..15: note = DNA
ttaaacacaaaataaacaag

SEQ ID NO: 617 - DNA, 20 bp, synthetic construct
  source 1..20: mol_type = other DNA
  modified_base 1: mod_base = OTHER; note = 2'-O-methylcytidine-3'-phosphorothioate
  modified_base 2: mod_base = OTHER; note = 2'-O-methyluridine-3'-phosphorothioate
  modified_base 3: mod_base = OTHER; note = 2'-O-methylguanosine-3'-phosphorothioate
  modified_base 4: mod_base = OTHER; note = 2'-O-methyladenosine-3'-phosphorothioate
  modified_base 5: mod_base = OTHER; note = 2'-O-methyladenosine-3'-phosphorothioate
  modified_base 6: mod_base = OTHER; note = 5'-methyl-deoxycytidine-3'-phosphorothioate
  modified_base 7: mod_base = OTHER; note = 2'-deoxyadenosine-3'-phosphorothioate
  modified_base 8: mod_base = OTHER; note = 2'-deoxythymidine-3'-phosphorothioate
  modified_base 9: mod_base = OTHER; note = 2'-deoxythymidine-3'-phosphorothioate
  modified_base 10: mod_base = OTHER; note = 2'-deoxythymidine-3'-phosphorothioate
  modified_base 11: mod_base = OTHER; note = 2'-deoxythymidine-3'-phosphorothioate
  modified_base 12: mod_base = OTHER; note = 2'-deoxyadenosine-3'-phosphorothioate
  modified_base 13: mod_base = OTHER; note = 2'-deoxythymidine-3'-phosphorothioate
  modified_base 14: mod_base = OTHER; note = 2'-deoxythymidine-3'-phosphorothioate
  modified_base 15: mod_base = OTHER; note = 2'-deoxyadenosine-3'-phosphorothioate
  modified_base 16: mod_base = OTHER; note = 2'-O-methyladenosine-3'-phosphorothioate
  modified_base 17: mod_base = OTHER; note = 2'-O-methyladenosine-3'-phosphorothioate
  modified_base 18: mod_base = OTHER; note = 2'-O-methylcytidine-3'-phosphorothioate
  modified_base 19: mod_base = OTHER; note = 2'-O-methyladenosine-3'-phosphorothioate
  modified_base 20: mod_base = OTHER; note = 2'-O-methylcytidine
  misc_feature 1..5: note = RNA
  misc_feature 16..20: note = RNA
  misc_feature 6..15: note = DNA
ctgaacattttattaaacac

SEQ ID NO: 618 - DNA, 20 bp, synthetic construct
  source 1..20: mol_type = other DNA
  modified_base 1: mod_base = OTHER; note = 2'-O-methyluridine-3'-phosphorothioate
  modified_base 2: mod_base = OTHER; note = 2'-O-methylguanosine-3'-phosphorothioate
  modified_base 3: mod_base = OTHER; note = 2'-O-methylguanosine-3'-phosphorothioate
  modified_base 4: mod_base = OTHER; note = 2'-O-methylguanosine-3'-phosphorothioate
  modified_base 5: mod_base = OTHER; note = 2'-O-methyladenosine-3'-phosphorothioate
  modified_base 6: mod_base = OTHER; note = 2'-deoxythymidine-3'-phosphorothioate
  modified_base 7: mod_base = OTHER; note = 2'-deoxyguanosine-3'-phosphorothioate
  modified_base 8: mod_base = OTHER; note = 2'-deoxythymidine-3'-phosphorothioate
  modified_base 9: mod_base = OTHER; note = 2'-deoxythymidine-3'-phosphorothioate
  modified_base 10: mod_base = OTHER; note = 2'-deoxyadenosine-3'-phosphorothioate
  modified_base 11: mod_base = OTHER; note = 2'-deoxyadenosine-3'-phosphorothioate
  modified_base 12: mod_base = OTHER; note = 2'-deoxyadenosine-3'-phosphorothioate
  modified_base 13: mod_base = OTHER; note = 5'-methyl-deoxycytidine-3'-phosphorothioate
  modified_base 14: mod_base = OTHER; note = 2'-deoxythymidine-3'-phosphorothioate
  modified_base 15: mod_base = OTHER; note = 2'-deoxyguanosine-3'-phosphorothioate
  modified_base 16: mod_base = OTHER; note = 2'-O-methyladenosine-3'-phosphorothioate
  modified_base 17: mod_base = OTHER; note = 2'-O-methyladenosine-3'-phosphorothioate
  modified_base 18: mod_base = OTHER; note = 2'-O-methylcytidine-3'-phosphorothioate
  modified_base 19: mod_base = OTHER; note = 2'-O-methyladenosine-3'-phosphorothioate
  modified_base 20: mod_base = OTHER; note = 2'-O-methyluridine
  misc_feature 1..5: note = RNA
  misc_feature 16..20: note = RNA
  misc_feature 6..15: note = DNA
tgggatgttaaactgaacat

SEQ ID NO: 619 - DNA, 20 bp, synthetic construct
  source 1..20: mol_type = other DNA
  modified_base 1: mod_base = OTHER; note = 2'-O-methylcytidine-3'-phosphorothioate
  modified_base 2: mod_base = OTHER; note = 2'-O-methyluridine-3'-phosphorothioate
  modified_base 3: mod_base = OTHER; note = 2'-O-methyluridine-3'-phosphorothioate
  modified_base 4: mod_base = OTHER; note = 2'-O-methyluridine-3'-phosphorothioate
  modified_base 5: mod_base = OTHER; note = 2'-O-methylcytidine-3'-phosphorothioate
  modified_base 6: mod_base = OTHER; note = 2'-deoxythymidine-3'-phosphorothioate
  modified_base 7: mod_base = OTHER; note = 5'-methyl-deoxycytidine-3'-phosphorothioate
  modified_base 8: mod_base = OTHER; note = 5'-methyl-deoxycytidine-3'-phosphorothioate
  modified_base 9: mod_base = OTHER; note = 2'-deoxyadenosine-3'-phosphorothioate
  modified_base 10: mod_base = OTHER; note = 5'-methyl-deoxycytidine-3'-phosphorothioate
  modified_base 11: mod_base = OTHER; note = 2'-deoxythymidine-3'-phosphorothioate
  modified_base 12: mod_base = OTHER; note = 2'-deoxyguanosine-3'-phosphorothioate
  modified_base 13: mod_base = OTHER; note = 2'-deoxyguanosine-3'-phosphorothioate
  modified_base 14: mod_base = OTHER; note = 2'-deoxyguanosine-3'-phosphorothioate
  modified_base 15: mod_base = OTHER; note = 2'-deoxyadenosine-3'-phosphorothioate
  modified_base 16: mod_base = OTHER; note = 2'-O-methyluridine-3'-phosphorothioate
  modified_base 17: mod_base = OTHER; note = 2'-O-methylguanosine-3'-phosphorothioate
  modified_base 18: mod_base = OTHER; note = 2'-O-methyluridine-3'-phosphorothioate
  modified_base 19: mod_base = OTHER; note = 2'-O-methyluridine-3'-phosphorothioate
  modified_base 20: mod_base = OTHER; note = 2'-O-methyladenosine
  misc_feature 1..5: note = RNA
  misc_feature 16..20: note = RNA
  misc_feature 6..15: note = DNA
ctttctccactgggatgtta
